United States Patent Application Publication US 2019/0183130 A1 - sequence listing, part 9

SEQ ID NO: 1 - DNA, 19352526 bp, Cryptococcus macerans (residues 15,482,025-17,417,277 of 19,352,526)
attgtcgggaggagggacagggccgttaaagatgaagactgtcgaaaagtggccagacgacgagggggtcagccttgaggcctgtcccgactgcggcttcgaggacaaggaaggaacgcactgtccggcctgacgtagccgacctcgagcttgacgccctgactgcccttgaagcccgggacgtcgacgacggcccggacccggccagacgcacgcatccggccgtcgcggccctccttgaggcgcatgccttcgatctcgatcgagcgcagcggcttgagcggcgggtcggcgggcgggacgggggccgttagcgggccaagttcgagcaggagggccgggaagaggcctagcggcctgtcggcgctggacgagttggaggccgaggagggcgtgacgtgcggcgtgaggtggagggcgagcgggtgctcgtgcaggtaagccgcgagaaacgcctcgagcggctggctcatgccttccccgtccggaggaagctgctcaaacagctcgccgcggatcgtaaagttgaagtgctcccttttgaggtcgatcgcaaacggctcgaccgccatggagccgacggcctggccgagcggctcgtccggcacctcgacctgggcggtccaggtgaggccgccgggccagcgcaggccggcgagatgaagcgcttgggcgtcggggtcggagaaggacgggttgggtaccgagcagttggcgaggacgatcaggcgcgcgtcgttgtcccggtaaaggacgtagtggtggagtgaaaggagcgaggtgacatcctcgagcggcgggagggaaggcactggcgatcattgagagataaagtcagaggccggagtggaaaacaacgggagctcaagatgcggagagggccgaggcggagagggtcggttgcgctggtccgcgccgtggcgacaaacgccctcctcggagatggcggcccattgctctctacagaaggccctccagaccgttcgaaaggaaagaagaagacgtacggtcgaccttgaccgcccggtccgtcggatcgagcgccttcctccagccctggatccaccggccgaccttgcccgatgccgtcgtcgacgccggcccgaccgaaccgccctcggtcctcacctcgagtgcgagcgtgtgggcttcccacgcgcgctggccgagcgcgaccaggtccgagggcgcgctcgcgagcgagaggtcaaacgtgagggtgatgggcgtgagccagtcgtctgcctcctcgtcgccggccgaggaggaggagtgggcgccgacggacgtggtgagagggacgaggagcgagcgtccgacaggccggatcgaagcgagcttgataggacccgacggccggccggcgctcgacgtcgatgctaggactggcggggcgaacaggccaatgtcgtccgggagcgcgaggtcgaccgccccgagccggtcgagcgcgaaccggccgacggccgtcctcagcccgttccagagcccgctcgacgtcccgtgcggtccgaccgcgagcagcgcatcgccatcgagccctagccggccgtcgatctggacccggccggaccagcggccagctcggtcggcgtcgacggaggaggacgaggacgaggacgcgttgagcagtctgacggcgtcgggcccgcggaagacgacggcccgttcgcctgcgtctgggctcggggtgagcgagcgtgcgagcaggccgagcgagaggagcgagaggagcgaggccgagatgagcccgaggaggacgagcgagagggcgaggatcggcggcggcggccgccggcgccgcttgctgctgctgcggtcggcggcgctgctcgtggccgacgtctcctcaggtcggcgtgggctcggtgaggcgggccgggaggaggagactgcgaggagcggtgtccgttcgtcggtggccatctctgtctggcaggagggcgggatgtatgcgtcgtgatgagtggtggatagtggtggtcagcgtcgaaggaggggggtctcggtcgatggtcggcctcaacgagagcagcgagccggctcccggccgcaggcggtgcagagccagcacgggccgacagcacttgatctgcctctctgagctttcagctaggccagaatggagagaagaggacacagaagcccgcataaggtcgtctttctcgtgaagcgacgaggcgaggcggcagtccaggcttggaggtgcttgcaacggcccgctgcgcgcgaccgacagcatcgcgcccagcctctgatccgaccgtctagtctccactgaatgaccttgcccgcatgacagtcgacatatccgtcctagatgaggatcgtagcaggttgcgcatgctccttcgctgtcgcgagctcgaccctcggctttgccctgcgctgcagcctggcttcgctgcgggcgggctcgccctggtcacaggctcaggtgagcatgactcgagtgcccgctttgcctgggcacattgagcgggcaggctgcctctacgaagtggatggcgatggtcgaaatggacgggtcgacgtccccttgtctggctggctggcggcggggcgttgccggcggcagttttcggccggcggctctggctcggcgcactcgccgccgccgccttcgctcctcctcctctccatcactctcctcttttctctcctcacaccatggacaccgcctcgctcacctccaagctcgaccaggtcgctctcgacagcatcgacaagccgacaccctcggccaagaagcacctcccgggcgcgggcaccgtctcggccgacggctcgacctcggcctactttaccagggtgcggctcctcccctcctttcactcgctggccggtcggtcgtcgtctctcgtcgctcccatcaagagcgtcagagggcgacctcgtcaggctcagcattcctgtcgtcattcgttcgcacgaagctgacggctcggctcactcccttctccccatcccattccggccgccctcgctccccgacgtcaccatctgctgccctctttcgccggccgctcctccgcaacgaccaaccaaaccgcccctgcccgcccctcattcagaggagcctgagatgggcactggaaggagtcggccgacgagaagaaaagcgcctgccgtgggatagtcatctaatctgcgaaaggggctgctcaaattcgactcgaggtgacgatgcgcttgaggcctggaagtgtgagagtaggccgtcatttaatcattgccataatattggcctgggcgtttacggccctttgggcggggcgaaggggcgttcgagcccgtttggccgggcgaatccattgcgccgtctggacgttctggcagttcgtacgcaggggttcgtttagacgttttcgaacgattgggtctttcgagcgcctgccatctccgtctgagcacgttgccgatcacttcagacattgggtatggcactatcaggtagccttacgtctgctctgtatgtctagctgtctcagtagctcctcgttcggggcaagaggaggatggagccacgctgagcaggcggtacgactcgcctagccggctacgcggcggcaggcgccaggctgcgaccgacttggcaggcgggcgagctcgccctccttcctcccgtccccatctccctgctcagccctccactgccacagcgtctcttctcgtccacttccacggcccgggaagttgcgaggtctctctcgacactccagcaacagtcgtctcggccggctgccgcattctagaccgccggcccagcagcctcggccggcgagctcacggcccgccctgcttgccccgccacctctctggtcgataccggctgctgacggctgtttcctcgacctgaccggctcagctagcctcaagccagctccgaagtaacttgccttcctgctgactgttgtctgatggctgactgctcgaggcgggccgaaggtggcgacccgcaagcgccggccagcgacaggccaatctccctcttcccgccagtcgtctcgccctcgccctagcttcgccttggccctgctcctctcggttgatctcagcgacctgacctgaactgacttcatcggtctcgcccagtctgctcgctcggggacgagtaactcgtgcgcgcggggtgcgggaggtttcgggcagggcgcggcttgtcttgtgtctgccgggccgggctcgaatctagccggttaggcccgatcacatgacgcatgtgactgtcttcagcatgtgattatcagcgaagtgatcggctcgaacggcgctgatggaggggctttgacgcgagcggcagagttggtgcgcgcgaagactttccgtttgcgcggacaggcctcgttcgcacgagatgcctcgtttgcacgaacccctctgttcgcatagcccgctgactcgcgggccctactagtttgatttagacgtttctctgtttaccctcttcacgctctgcccaccaggctgcaacgagcttgaacgagagcgcctagtttcctaaccattcaggggcgtcagcttggtcgtccgccctgcactcgggcagacactcctagagagctcgctcaagacgaagtctgagcctgagcgacgtcagtaggatctgcagctagtctagctgcggccagaggcatgcatctagcttcgctgcacccttgctgctctcgacgtcagctctcggcgacaggggctcaccgtctggcccagtctccatgcgcaggcttcagccctccagagctttacaagacaagccaaagatgaccagaagagtagcctaagctcaagacaagctgaacagcaccctgtaaaccatcttaagcacttgccggctcgcaaggaaggacgcgatggccgagcccgccatgaaaggggcaacgaaagcccccgacctcgatttcgcgtcggggccattcgggggctcagggcggggcgcgactgtcttcgccgcgggcgcgtctcgtcgagcagcaggacgacgtcgacgacagctcgcccagaccataagccgcctcaggactcttctcgccagcagatccttctcttctcgccgctcgcaagcgatctccgcactatttcatcctccgaccggatacgacactcattcaagacccgctcccgctcggccggctaccacctcgccgccccctccctccgatggacgaccctcgctcagcagcagcagcacctccccgaccccgttcgccgcctcgcccgtcctccaagagcaccaagaaggaccggataccctcgacaccgccgctccttatccgcgacgtcgggcggcagagcacgtttcaccggctcggactgctgggcgaggtacgtctcgcgcggccaacccggcgttatgttgaccgacggggcgcgcgcccagcttgtcctccagcccgcgtcgctgacctcccaactcgcgtgcctccttttcagggtggctttgctcgcgtctacgaggtccaggacgatggcggacgccggcatgcgttcaaggtcgtgtcaaagaagtcactgcagacgaccaagacaaagaccaaggtgcggcctacggcctggcccgcctcgcctcgccttggcgagctcacgctgaaccgatccctgcgactgcccggcccgctcgctccagctgtatgccgagatcaagctccataagatgctggaccacccgaacatcgtcggcttcaacgactgctttgacgacgacgagaacgtttacatgggcctcgagctctgcgagcgaggcgtcagtctgcgcgccgctgcttcagtcatcgtccaggctccagctgacgctcgcctcttacccatccctcatatcgcagagcatgatggatctcctccgccggcgcaagggcctgaccgagcccgagatccgctactatctcatccagctgatcggcgcctgcctctacatgcacggcgagaacgtcatccaccgcgacctcaagctcggcaacatctttctcgactcgaggatggacgtcaaggtcggcgactttggcctcgccgcgctgatcgagaaggagggcgagcgcaagaagtgagtgggcctgggcggcagcgtgcccgatggaaggagatggcgcggtggctgatgacacgctcggtcatgatgcaggaccatctgcggcacgcccaattacatcgcgcccgaggttctctttgacacggccaatggtcacagcttcgaggtcgacgtctggtcaattggcgtcattctgtgcgcaaggaaccctccctcaatcgcaggcgcgatgccattgctaacggcccgccaccactcatcgagcaggtacaccctcatcatcggcaagccgcccttccagacgaaggagatcaaggccatctacaagtgtgtcccagaagccgtcgctgatgcgcagcgaacgcgcgtccctgacgcgctctctatctctcgttcgccaggcgcatccgcgacaaccagtacgactttccgcccgagaagccgatatcgcccgaagcccgcgacctcatccaggacatcctcaccgtcaaccccagtgcgttcaactctttctcctgtgacttgatggctcatatctgacgtccgcgccccctcaccattggcagacgaccgcccgactctccacaccatcctccagcaccccttcttcaccgccggccacttcccttcttcactcccgtcctcttccgccgaatgcatccccgacttcagccacctgacggcccagcagtcgagcgccaactttgcgcgcgtccgtgcgcgggcgacgcaggcccggccgatcgcgacgagccgggtccggccgagcatgggcccgagcgtcgcccagcaggagcgcgagttccagcgcgccgtccagccagagagccctctctcgacgctgctcaggtgcgtccggtcactcgcggctctgtctcatctcgactctactgacaccttctcccctcggctttctcagctccgctgtccaaccgctgctcgtctcgcatgagcccagaccaaaggacggcaacctgctcaacaagctcacgcacgtcgcccggacgtcgaccaaggaggctcggtcgtcaccgcttcggaaccagcgcgcaccactcgacgtcctcggcgaggaggggcctgtcgacaacctcgcttccgagccgctacgtcagcgcgagctcgacggccagaaggcacggcttgttgctgacctcgcaaagaactttcccgaggcgacgacggcgccgttgctgcgacatgatggcggcgaccgacatgagcgccgagtagcggtcgctccgtcgacgacatcgcacgacaaggagaatgatggcggccgaagcgtgcggccggcgcagaagctagcctcgtcctctagccgatacaacgcccacgacgcacagccgacggctgggccttcgaagagctcgcaagaccttgcggacggccagaaaatctcgggtggcgtctttgacgtcttctctcggaacctgtgcgaggcgttcgactcgcgagacgccggacgcccgtccgagacggcctgtgagtggtctcacctcccgccggtcgacatacccggtctctgacaatctcactactaatcttataacagacatcgcgccgcagccgccgacaccgaagaacttcatcgtctcgtggctcgactactgcaacaagtacggcatgggctacgctttgactgacggctcggtcggcgtccacttcaacgatagcacatcgatcattctcgccccggacaaggagtgcgtcctgcatccaagaccgacccgctctggcggcgcgcccgaaggctgacgattcgctcatcgagcaggcactttgactacatctcggccttcagcaagcagaagagctcggtcctcgtccggcgcaactacacgctgagcagcttcccggacgacctctcgaccaagatctaccttctcaagcactttcagggcttcatgcaggagcggctccactacgacaagccctactgcttcaccgacggcgcccggactaagggcatggactttgtccagcgctacctccgcatgaagcacgtcatcgtcttcaagctgagccacgatgtcctccaagtgagctcgctcgttgaactcgggcgatctcagcgcgactgctgaccctaggcctccctttaaaagttcaacttttacgaccacagcaagctcatcctgtcgtcgcgcgggcttgtcgtcacatacatcaataaggactcgcagctctcgacctggagccttgacgagctcctgcggcccgagggcctcggccacgaccgcaaggtcgtcgacagcatcgtcaagaaggtcaagtacgtaaaggtcctcctcggcacgatccggtcgacctctgccgcaccagcttcatccgcctcttcggcggcggccgatgccgtcgccggcgcaccactggcagcgtaccggacgccgacgctgatccggtgacccgggcggcgggctgtcgatgtcggatgggcatgagctgaacgctcgggcgccgacagggccggcctgagccgtgtaattctagcgacgtgtatgatgtcgcgcatgatcttgagaacactgatcgaggcttcagaccttccaggcttggaggctgcccgtgagcgaggcagagagcaaccaaacggtcgacgagacgggcgaggcaacgacgcagagtgacgcgatggcctcgctctggcctgagtacgcagccgacgtgaccgtctcgtgcgtgaccgcaacagtcccggtcgagtggctgcgaaagacgagagtgacagatgatgagctgaggggctttgcgcgcaagaagacacgaccgacgcgacgcacaaatacgaggccttgacttccgaaccgggtggggccagcatccggctccgctgcaggtcggcaaagttgaggcaccggattcgaccggagaggccagccgtgaagacagtcggcccagagacgacgccctcattgcggaggccagttgactggtgtgcgcgcgactgaaccgcgatcgcgaggaccgccgacaccggcgtcagcggcggcgacgaccgctgccgtgagcgagcggcaaggatctgcgccatcgccttgtcaatatcggcatcgctgaccgcgggcgccagcgtcaccagtgagtcgggaagcgaggcgcttgggtgaggggcagccgtcgccgacgagccggacgtcgtaaaggtctccatgagccggccgctctcaacctcgtagctttgaaggaacgtctcgtcggccgactcggccgcgacgagcacccagcggctcttgagcggatgccgcaggcagaaacggacgcggcctgtggtcgaggccgaccacgtccgaactggtagagcaaagcgagcgtcccagaccgacagaatgccgagcgaggtgccgatcgcaacccactgccggccgcgatcggcgtagacgcaggacggcgggccctggttgagaggaagcgtaaaggtcctgaggacgcggagcgagcagagctcgagcgtcacgatcgaagagcccacagttgccaggacgagctccatcgagccatcggctgaggtagggatgcggggggatcggtcagcccatcgacgaacaacgaaagaattttggagaagacgtccgcaacgcacctgctgacaccgagcaaagcgccacagcatattcgcctgcgctctcacactggaagaagcgcacgagctcgacctcgcgaaacttcggatgtgagtagggcgacgaaatgtggactcgcaggataacgacggcaccgtccatgcttgcgacggcgagacagtgcgtatcctcgacaaagcagactacagtcggtggagcgccgagctggtggacgagccgcggtttggacgagacgttgcgttctagccgagcggtgtcccagacgcgaagcgaattgtcgcggtgggtcgtgacgaagaagatctggtcgggcgaagccaccaggtggacgacgggcgagccggcctcgaggaagctgaaaggggcgttctcctgggcgcttgcggaagcccgcgatccgacagtcgtccggttggccgaagctttccgacgactgctgacggctgccgccgggctaatgcgcgggccaaagtcgtgcgccgattctttaaggctgtcgaggtaggcgacctcgaggaaatgaatgatgttcgggtcggtgccgtctagtgcggcaacaatcagctctgggacaatgtcggcgaaagagagaagatcagcgcaccgtagccttgaatccggtctcgagacatgcgagccggcgcgccttcgaagggcgcctccttcggccccgggctcgagctggccgatatggcctcggcctcactctcctcgagcggccgctccgactggctgtcgatgagcgcagatgcggtcgtgagggcgacgccgacctgcggtgccgacttgccgttcgggcttcgcgcctggctgtgctggctgatggacaaagccgtctcggagggagggacgctcgaggctggcaccaggctcggcagcggcaggttgtcgatgactggagctatcggtcggagtcgtgagagggagagcggttcagccgcgctcgaccgaccgccgtccgacatggtcgaaggccggcgctcgagcaggaccgccctcgaaggagcgcgacccttcagtcgcctgctgacagcagccggacctgacggctgaatgttgaagaagatgttgcggggcgtgatgccgagcgagttgagcgggacgacctcgagcgtcgccggcgaatcagaaaaggtcgcctccgggccaggcgggctttcaaggacggaagaggtcaaagtcagtagactgacgttcaagcagtcgtgctggcggcgacgatcgacatacctttgttgccggcgcgccagcttcagcagctgggcccgcatcgagattaggcgcgactcgtcgccgtccgtcaggcccttctgacgtagcgcagcgagcgccttttcgtccctgtgaagacgtgcgcagctcgagatgagcccaccgatcgctggcatagcgatccaatgaagggaacgcactcttctgacatgatcgcctccgtcgaatcgggcaacaggccaagcgagcctgaccgggcgttgcgcgcgaccgtgccagaccctccgaccttgatgggtggctgggtgagcgaccagaacggcgacgtcgttgctttcgtaccccattgtagagcggcatcgaacgctggccggggtatctggaggcagatgggatcgaatttgcgaggcacgtcagtgacagattgcgtcctctcgccgaaaggcgtgcttcactcactggcgacagaagggcatcgagcaggatcgactcggagagcgacaccgtctcgctgcggagatgaggtcggatgctcgggtagaggatgcaccactgatcggtgaccggcagccgcttggcgatcgcactgagcaggccagcgacggctgaaagtcggaagaggatgagcatcagtacttgtggacggctgagaggcaagccggggagacgtactgtgccggatccaaacgtttgggtgaagtaggaggccgaggcaagcgctcgcaatctcccagagccgacgccggccaaagagaccaaggtcggtgagcgccctcatgctcgacagtacgcgcgagagcaccgcctcttctgggtctgccaaggcctggagcagcaagggcaggacgagtgcttcgagtccagcgctgccgataagagcgccgacgccgacgacgctctcgaagaagtcgcaacggagccgccagtcgccgtcgttgaggaaggtgagcatgtgcgagaggagcacgtcgtccgtcgtctgccggccgagaaagaggcagaacgttgtgatgtcggcgagtaccgcccgcttgacgaatggggaagggtccgagagcagtgtcgtcagctccacctggagcagtgcctgaagttcgtccctggcttggtcgtacgaaacctggtcgtcggcagcgttaatgccctcgtcagatccctcattgaacagagattcgcaaggtcaatcaacgacgggctcacctcctcgacatcgcccgcgccgatgccgtcgtccctcccgccaagactgcgaaagctctcgcttaggtcgaggaagcgctcgcccgtctcggttaggccggcaaggcagctggcgtacgcgacccggacctcgacctcgtcgtcgtagccaaggggacggacctgcgggaggacaaagtcggtgacgagggccatgttggtcggcgagacaatctgaaccgtctcgagctggcagaggagattggcttgcttcagcttaatgacgctttctttctctcttgagcagaagaaaaactcaccagtgtcgtcaggctgcgaaccgctccggcacgtacggccggccgctcgtccgccagcagatcggcgaggaacggcaccgctcggtcgagtcgcgcctcgtcggtaatgtaacgcccgagccggaggatgaggtccatcgcgcggacgagcgaggtcggccggtggcacgagcgaagttcggacgtcaacatgcccagcaacagtagcgcagggccgtctgcaaattatcaatcaggagtcagttggcagcgctcgccaagggccggagagggacgcaccgtgttggatcccaccgcctgcctctcccccgcctccaaccgactcgccagcatccgtgtcgaggtatgacttgatgctgtcccagtcttcccagagctggccaaccttgtcgtcggcgacggtcgatcggcgagccgtctcccggccgccagcgccggtcgccgcgcccgacatggccggcattggcttcgacgacatcgcctccccgtcggctgtgggctgtgcagcgtccggcgcctcggccgccatgaaggtcgcaggtcggacctcggccagcgcgcatgcgtaatcgtggagaaacaagtagaagatttcgggaaagacgcgccctcggaaggcggagagcacgccagcgaacgacggccgatcggccggagcgagcgccgtcatctgccggaccatgtcctgaagcacggccggttgcggtacagtcagtagattgagagctgagagccagcgcctgttcagccacgcacctggacggccgcgtcggggatcaggcggacaatgctctccgggctcgactggcctttgcggaaggcgagcatcccactcaggtcaaagagctcgcgcccgtcggtccagagctcggcaaccacggctcctgcggcgaagatgtccatcggttccgtcaccttcccgtcgcgcttgccttgctccaggttcgccgcccgtctccgctcctcggccttcgacccagcagcgaagaagcgctccggcgcgaggtagcatgctcgggacgacccgcccggggcgggcgcgaagaagaaggagaagtcggccgggtcgtcctcgggcaggtagaccggtttgaacggtgagagatcggtgatgagtaagtggagcgaagacgagacgagcacgttggacggcttgagatcgccatgtgagagctgtcgcggcaggtagcacaaggtcagctatgcctcggcccgctcgttggcgcgtccgacagactgtcatcgggcttggctcgagcaagaggacgatgtaccttgcgggcgcgaatctcagacattccgacgagcaactggaacgccagccacttcttctcaatctcggccaggaagggacgcgtgctgtgtgagaggacagaaagagagcaggttagtgatgaaagccgagagcactcatgctcggagactgactgcgccctttgagggcagctcgccgcccggccgccgccctcgccagtgacgggcccaggtcagtagctcaaatgacgtacctgatacggtcgtagagatcgtttgcgaggtactgccggactaggtaggctgctcggtccgtctcgaccatcgcctggtacgggtagacattggggatgcttgcgagcagctcccggtcggctgcgtgaagcgagccagcagaaggcgtcagcaagatccactttgatgtgcttctgggcgtgcaggtaacgctagctgagagccaccgcgcacacgcgagtggcttcgagtctcttcttcctcattacagccctcacgcgagctcgcaacgcacccttgagccgacggcggtggacgaggagcgaaaggcctgggtcggccttgacaaagaccttgacgacaagtgggccgttcggatgagaagccttgatcgtcttgaggaagcgcgaatggccgatgctggcaaatggcgtgctcgtcggagtgtgagctctgatctggctgtcgtcgtcgcgctcgggaggacgaggccggcagggagaggagggaacgcacgaggcctggtaggtgatgtcgccgccgagctcggcgacatacgagtcgagcgtcgtcggcggagtaggcgcccctatcgcacgcgagggcagattgcccatggcagatgggcgagctagtcaaagatggctgccggacggacgaggtcaaggcaaggcgatgggcctcaagcggcggcgggccatgctgcgcccgcacgctggcggagcttgaacctcactcgcgcgcgcgcggcggtggccttgcctgttggcctcgctctacagccgacagcgctcaacacccctccttccctctcccctctttacagcttcctcggactccctcttcgtcgatacaagaaggtcaagatgaagctcgtacggtgcgcgaatctttttgcggctgaagttccggatgaagggaagggatccgctcgtccaggccgacgcggcagagtggtcgagatgcctagaatactctgcccgctcgtcgcctccgctgcttcctagcaccatggacggccggtcgccgagcaaatccggttcgtgatgacatcgacatggtcgacgctggagctcggcgagcaggactacctaccagcagcacggaggcgaggctgatggaggtggatgcgtggtcgagcacgacttcccaaacggcatggggtcggcagtcgagacgggcttgcgacaaacaacgagcgctcctcaagatatgcccagctgacatgctgctctgtcgcttgtcgctgccggtcgatgcgccaccaggttccttatgaagctctcgaacgagaccgtcacggtcgagctcaagaacgggtccatcgtccatggcacgatcgtcggtgcgttgtcattcatccttccttggcccaaccagccctacacgggcagcacatgggggtggtgaaaaggggcggcagacatgggcgtactggcggcgccgagagtacccgctcggatgggcgaacgtgcggcggtcgctggctgttggcacccagacgacccggctgaatggcgggccacgctgcctctaaattctgcatccagtcgccacaggggatgatgggattgactcttacccgtctgtcgtgcattaagctgacccttgctatcttctcgccctctcgtcagccgttgacccgcagatgaacacgcacctgaagacggtcaagctgacgctgcgcaacgcgccggcgccgtcgtcgcttgacgccctttcgcttcgtggtcagtcggccctcagtcttgcctctggtcgcatagtgtccagctttgactgaccccttagttcttgcccttgactgttgatcgccctctatccgctcctggtcctcaggcaatacgatccgctacttcatcctgcccgactcactcccgctcgacacgcttctcgtcgacgactcgcccaagcccaagcctgggccggccggaaagaaggacgccggccggggcggtcggggtggccgtggcggccggggcggcatgcgcggtcgcggccggggccggggcatgtgaagcattctctttctcgcttggtgctcgtcccgtcgtcgagagagcattctcgtcgccggttctcttcttaagagggttggcgccttcggcgatcttcgtaggcgggtcgctggagtgaaggtgtaccgggcaagagagttcaggagggtttcgctttctcttcccgcctagcctctgcctgcgctgggctccccaccaccctcttcttcctcctaagtgtggcgcttcttatcgagcagaagagaccaaggctgacgactgagcgacgagaagggaatgagtgcgacaagtcaaatgcttgaggctcagtcatactcgccacccgtccgatatcacccgcaaagctcctcctcgtcatctactagcccgtctgtcttcagtcgccctgcagctcggggacgtgaactctgatgaatgtgtcggaactgcacggcaggctgtcagtcgtctctgtcagtctcgtgcggccgccatctcggcccgcgcccgcggacgagccgacctgcctgcgggctccctccctccgacccacacctccctcctcccgcccttctctcgcactaactccctccatccatcatgcgggcaagcagactcctccgcgccggtcacggccactacagtgcgtccctagagcggtctcttgactttggctggtgaacagagacgctgacctcaaggagttgccccccttgcttcctcgccagagcccctactggtccgtcgcctaccgccttcgtcctcccgccacggcctctttgacactcatagactcagctgcctgactctcttctctccctgcacctgtgctccgccctttgcagaaagacccagcgatcgagcgatggcaccagatgcgcgaggacatgtacaagggcttcacgctcacgcgcgagaacgccatcccgaccctgacgctcgccgtcgtcatcccggtcggcctctactacgccatgtgcgcggacctcgtgcgtcctgggctctctatgtcctctgtgctggcctcagctgctcgctcagagctgaccttcgctttcgcgggctcggcaggagcgcgggtgggacttcctgggcacgacggccgacgtgacgagccagcgcaagctccgcaagccagaagacatcgagggcggcctccccaaatttcacggccagtacgaggacgccaagtcagcgtgaaggggcgcgactcttccggcttcctctgacgacgatggacgatgcacataggctacacttcgggctgaggccgacgtaggcgagcgcggggcgacagctcctaggccgagtctcaccgccggcgaacgtctcatgctgagggggttcgagcgatcggggtatcggcacacgcatgtgtccgggtggaaggggagcagcagaggaccaggggtgaagagcacaagaaaacggggagctacagagaggtacaaggggaaggaacgggacaggagaaaagagccgcctagtcgctgctgagcttcttgatcatgcgcttctcgcgctcgcccgtgaccttgaggataccctcgttctgcaagaagtgagagcgtcagcggtgcgcgaacgggtgtcgaacgcaaaagggtcgggacgcacctcgagcgcgcggacgacctcgctgaactcggcgttgtcgacgacgatgctcgactgctcctcgagcttcttaagcgcctcggaccagcggaggccgcgattgccgctcgcatcaataagctgcgtgatggcccgcttgaggtcgcccgcaacacgccgctgctgctggccggcgcccgtgttgatgaggtcgaggtcgatctggccggtgattgggtcggtcgcgctctcgcggatcgcctcgcgaatcagccggccggcctccttgacgtcctcgaggtcgaccgtgtcgctgaagcgcatccgggcgtgggcctcgctcagccggatcatcgactcaagctgacgcgttgtcgcggtgatgcggcgctcggaggaccgagggtcctcgccgaccttgcgcatctcgacgtaggccttgacaagggccgcaccggcaacctcgctgatgaccgggtgaatcttgttgcgggcgtacgtgatgtaggccgtcagctgctcgacgggctgtcaagaggaaggagggtcagctttgtgagaagctgagagctgcattcgccaggtgacgcacgaggatgtcaagcgagccgctctcgggcttgtcctcgaggtagagaccgacgaggtgcttggccagccggcggtccatgccctcatcgatcttgtcgaggacgaggtacagcaggtcaaaccgcgagatgagcgtcggcgggaggtcgatgtttttggtgattggccatttggggttgtactttgagccgacagggttcgccgccgcgaggatcgaagtccgggcgttaagcgtcgtgatgatgccagccttggcgatcgagaccgtctgctgctccatgacctcgtgcaggaccgaccgcgtcgcgtccgacatcttgtcaaactcgtcgatgcagcagacaccgccatcagacagaacgagcgcgccgctgcagtgtatggcaaggcaaaaaggtcagcgtgccaacgcagacgaggtcgacaggagagtttcaagggacgcacgactcgaggacgagctgctttgagtccgggtcgcgcgtgacgtaggcggtgagaccgaccgcggacgagcccttcccagaggtgtagacgccgcggggcgcaatcttatgcacgtactgcaaggacgaacagaggatcaggtcagcctcgtcggccggccgagaggtagagcgacgaaaggcgcgcgcacctggaggatctgcgacttggacgttccggggtcgccgacgagcaggacgttgacgtcaccacggtagcgcggcccgccgccgccaccaccgcgggcaatgctcttgttggtgccaccaaacatctgcaggaggatacccttcttgacgtcgtccatctcccaaatggagggcgcgagcgagcgcgcgagcacctcgtagaggtctggccgctccgagaggacgatgagcttctgctcgacctcctggacgccaccagcgccggcacctccgccgcccgcggcgttcgacagcatcgcctcgtcctcgtcctcattgccgccgatgccgacgcccggcgggcggccctcgccctggcgcgtcgtcgggtcgtagcccatgcgggtcgcgttcgtccgcttgacgtggacgacgtcgacgtacgtcttgaagagtgccttgatcgaccggttgcgcgggttgacgcggacggggatcgagcggaagatgccggtgatcatgacccggtcgccgggcttggtgaggtcgacgagctcgtcgtagacgcagagcgagaccgtgtgaggcgtctggccgtcgggcacagcgtcgggcgtctcctggagccggacgacctgcttatcggcaaacgcgcagcggttgtggatcaggctcattgagcccttcgacttgcagacgtcgcgcgggcagacgtcgggctcggcaatcttgccgcgctcaatgtcgacctgcatcgtatgcgagcagacgaggcagcggaagaaggccgtcttcatgtcggggatgattggcgtcgcccggatgacgagacccttgatcgagatgagcttgtcggtgtctggcaatggccgggcagggagggaaggggggggtggcgggtgcgcgtcgacggcctcgcccgccgtcgagtcctcgtcctccgagtctgaccaagtgaagcgcgagggtgacgaatggtcgatcgagtagcccatcttgcggtagaaggcgatcgctttgacgttgcctggcagggcaagcgggtgtcatgcgtagtcagtcgcgtttcagagcggcggtgagggaaacggacgccttacgcacttcggaggacggtgaggatgaccttgcggcaaccccaggcgcggccgagactctcgagccgcgagacgagataccgcccgagaccggcgcgctggaattcgctcgcgacgctgagctcgtatctgcgtgtgagagcttcaatgcgtcaggtgaggttcgcctgtggggcacaacaagagacgacgcacaggtagacgattggctcgtcgatgccgtgctcgtttggctcggtgtcgaagcgccacatgaggtagccctcgacggataagctcttccgctcctcctcctcgcgctttgccgcctctgccaactgctgacgctcggcccgacgctgtgcgcgctgcttgagctccgctgcctcggcggcggcctcgtacgcgagccggcgctcgacagaggccttgcgcggccgaccgagcttcttccgtttggcatacgggttgtacggctcctcctcctccgcagccgcggcgtccagaggagtcgatgcggaagcgataggccgaggcgtcgcaggcgctgcggcagccggcgagcccatcggccgccccgtcctggcgtccgtctcgcggtagtcgactgtgctcgtccgccgggctgacgtccgcgccggcggagtctgcgtcatggttgccgaccgagaggatgccttgacctgtgccagaggcgtcgtctgtccggacgctcttgccggaagacgttgcgagcttccctgagcggcaatcgggctggcagcgggaggctggaagcgggcgctccgccggcgcgacgtcgtgtcaaaaggagccaaggagcgagctttgccctttgacagcgagcggccgtcagccgaggccgaggtggtctgcatccggggcgcggcggaggcggaagggcacgacggcgtctgcaacgaggaaggtgcgacgaggccactcgggacgccgatgaagctcgatgagccagccttgctggccgacccgctcgactccgaagcacaggcagaggaatgttttccgtccttgacctcagcgacggcggtcgagatgacagtcggccgggccgcggaagcgtcggagggttcgcccagcgacgtctccgagctcgaaggctgcagcggaactgtcttgagcggtggcgacgacgaagatggcacgccgagcatattggacacctgctgttccttctcctccttgacttcagctggaggcgagcgacgggccggatccgacgatgaggcaggttcccggccgggggacgagctagcaattgccttcggcgtggagtcgagctcctcagctctcaacgcagggacacactccgctgtgctcgccgtcgccgtcgcttccaatgccggtgtggtggccggcgtcgcatgccgaagcagaatgtaccgcgactggggatggaagagctccgactgcttggccttgggcgtccagccgaaggacgagacgcggtaggaggcgctcatgttctccttgaagatggcccagatccggcgcttgtcgtccttgtcaaacggcgccttggcgacttcgacaatgaacctggaaggagatggacgggccgcgagcgagcgagtcggccggcggaaggaacgccgtcagctgcgggttgaacgaagatgagcccagcggcggctctcacgcacttctggttgcctctcagcaggcgtgactggacgagctggccgtcagcagcgacaagtcgggcgagcgcatcgacactggcgtcgttggcgagcgcgacgaccgcgtcagggccagcggcggcgaggacggcagcgtcgggcgggccatcaccgccaaagccgccaaaggcagaccggccggcaagctcttcgggctcaggcgagagcgagctcgtcgtcgacatgagtccgcgtctctcgggctgagtgcgtggtcgtgttgcggcggacgaaagctaagagcgaccgacccgagtgcgggcggcgttgctgaagggcagactgcggccggcccgtaccaagtcaacaaccctaacttctgcaggaaggcgatcgacgtccccgggcgatgctcagccctcggccttccctccgacgcctcccgtcgctggtcatcgcacgccgtcgccatcgccctctcaagtacaagccccttgctcgtccttacctgcctctcttcagtcaggatggctactgccctcctccggtcacgaccgcgctgccgtgggcgcctcgccgtcctcgcgcgccgtggcgcgtcgtcgacgacctggacgcctaagcccgtccctggcgaggacgcgacgccgtccgcctcgtcgctcgccgaagcaggcaagctcgcgccgcatacgacgacgacgtcgagctcgtcgagctcgacaaaggcctattcgcacacgctcctcctgccaaagccgtcgttccctttgacgccgccgccagcgaccgagcagcgcgagcgcttcggcaggaggacaggtccgggcctttacacttggcagcggtcgagaccagacgcccagccagagagcagcgatttcgtcttcctcgacggcccgccgtatgccaacggtgatctccacatgggttcgtcctgatcgtcgcatcgcgctcgtcagtcggacgcgagctgactgtccgccttctctctcgacctcgtccgatcgcctgcgcatcaggccacgcgatgaacaaggtcctcaaggatgtcatcaaccgctaccaggttctgcagggtcggcgggtgacgtacgtcccgggctgggactgccacggcctgccgatcgagaacaaggctctcaaggcgctcgaggccgccgatgacgcctgcgctagcggcgagtcggccgggccgagagacttcaccgacgtccctcctgccgagatccgggcggcggccaggcggctcgcgctcgagtcggtcgacggccagcgcaagacgtttgagcagctcggcgtcatggccgactgggcgggcgagatcacagagactggcgacgcaggcggtggaacctacaggtccctcgaccagtcgtacgtcactagtcagctcaccctcttcaagcacatggtcgagcgcgggctcgtctacggcgcaacccgaccgacgtactactcgccgagctcgcggacggccctggccgaggctgagctcaagtatgtcgaggaccacgtcagcgagagctgctgggtccggcttgctgtgccctcgtccgagcgtggtgacgcactcagtgacgtcctgaaggcggcaggcgagggcgagacggcggaagtcggactcgtcatctggacgacgaccgcctggacgctaggcagcaacatggtgcgctgcgcatcgagcggaggtccttgaggcgacggctgacttctagccacctgcctcctttcgacaggctgttatgatccacccagagctgtcctacacgctcctccggtcagcaaagcatggtctgctcgtcggtgctctcgaccggatcgaggctctgtcggccgcgctcgacggcgaagccctctcacctgtcggcgcgcccttccccggctcaaccctgctctcgacgcgctataagtctctgtttgccgcacctacctcgggcgacacttcgacaccgccatcagagacgaagcctgtcatcagcgccgggcatgtcacctcgcagtccggttcgggcctcgtgcactgcgcaccggcccacggactcgacgactacctggccttctcggccgccttcccgaggtcgtcctcagcaacggctctcgccgacttgccgagcccgatcgatgacagcggctgcttcgttgccggcatcgacgaccggctcgttgggctcgaggcgctcggccgcggttcggacgtgatgcgcgacatccttcgcgagcaggatgtccttctccggcaggagcgcgtcgagcacaagtacccctacgactggaagacgaagcagcctgtcctcgttcgggccacgcgccagtggtttgccaacctcgacggcatcaaggagcaggcgctcgaggcgctcaaatatgttcagtttgtgccggcatcctgtgcgtcctcgctactaggattgaccttttggtaatctgactgaccgagctgtccttaacttgccagcccgcgctcgactcgagtcctttgtccgctcgcgttccgagtggtgcatctcgcgccagcggacatggggcgtgccgattccggcgctgtactcgctcgagacaggcgaaccccacctctcggccaagtcgatgacgcatatcctcggcgtcctcgcggcaaatggcggcgagcaagcctggtgggacctgccggccgaggactttgtcagtgccgagctcgcgtcgacaacgaccctgggcaaggccggctggcgcaaggggaccgacacgatggacgtctggttcgactcaggggccgcttggagcttgctcccggcgcgctcggccgggcctgatggccagccgaggccgagggccgacgtcgttctcgagggctcggaccagcaccgcggttggttccagtcgctgctcctgacgtacctctcggccgacggtgcggcatcatcgaagacggacaaatcggcgccgcgcgcgccatatgggacggtcatcacgcacggcatggtcctcgacagcgagcgaaacaagatgtcgaagagcgacggcaacattctcgcgccggcaaccgtcatggatggcagcgcctttgccgaggacgagtctcagccgaagcaggtcggcggcaagaagaagaaggacaagccgctccaggtgcgttgcgtgctgctcgtccatgcacatgtttcgcccttgctgatcctctcatactcgctgtcgcccgctagacgcactttgggccggacaccctacgcgtctgggcggcgtcgagcgactacacgagcgattcgacgatcggcaagcaggccatcgacgaggcctcgaatcatctcttcctcgtccgccgcatcctgcgcttcctttcgggctctgttgatgactcgacgcggccgatcaccgagcatgagcgggacgagctcactcttgtgcggtgctcctcgcgaccctttgtcggacatgccgaacgcgacactgacggcccacattcgttctgcaggccgacaagtatgtcctccacctgctgaccgagtttgacaacgccacgcggcagtcatacgactcgtttgctttccacccgggtgcgtgctccggcgactgcccatcagcgtctggcggccgctgacagggccgctttctcgttcccaaacagtgatgaaggacacggtcacgctgctcaaccacctttcggccttctacatcgacatgacgcgcgactctctctactctgacctgcccgagctgcccgctcgtcaggtcgtgctctccatcttccaggcggtgagtcttagggcccttcgcgatcaatcgaatcgcctctgccggtgctgacgcgccctttgcgctcgttcaggtcctcaacggcgtctcgcaatcggtcgcaccaatcgcgccgttcatggtcgaggagcttgccgagcatcgtaaggacgtcgctctgcctgccgagtcagccttctcgctccgctggcagacacctgtacgtcgagagcagccggctttatcctgccgccttgcaatcgctgactgccctctcgcgcagcttgcctcctggaaggacgcgcaggtcaaggccgacatgcaggctctgctcgagctgcggacgcacgtctcggcgcttctggcgagcgcgcgcgaggacaagaaggcaaacgtcggccgcatgagccaccttgagatgcagctcgactcgtccgacttggcgcgcgttgtcgaggagaatcgtaagcattcccgctggctccgcctcgtgctctgccctttgttgactcagaagttttcccgactccggcccaggttcgatcctgaccaacctctttggcgtctcgcacgtgaccatcgttgcgacgccgatagacgagccccagccgtgggaatactcgacctcggttcctaccagtgccgaaactgacgatccggcggcgcggatagagctccgcatctacccttcggcgatgcataagtgcccccgatgctgggactttacctcgcctcgcgaggagatgctctgcgtccggtgcgagacggtcgttcgcgagtttgaggggacggacggcggcgcatcgtagcgcccagctcttggatgagatgcttgctgctcatcctggagacgctcgacaacagaggtcgatatgggcgtgcatggtcatagagggacggcgtcgctggagccgctttcccggttaatgcaggtgagaaggccgacagcagcagacccgtctgcgactgtcctcgtcagtggtggttgtgtgaggtcgtcgaaggcaggagatggaagtcgtgtggtcgtaaggaaaataagggcgtgatctatgtgaagaagagcggttcatgtgggctcagaagccagaggctgcgcaagggaggcagtcagcttagacagtcttgcggcgccgacgaagcgagtagggcgtaccagaaggcacaaagccgaggtcgtagatctgaggcataagatgagttcgagcgtcagctggctgtaggagagagatctactcgacttcgcttgagcccgcacctggttctcaaagtcctttagcagcggatcgtccctccactggacgacgtcgtattgctcctggtggtgagaaagaaggctagttgtcagccagctgcgatcatcagagaagactgaagaccagaagcacctgatcccagacgatgccgagaggactctcgccagcattattggccggcacaccccagccctcgtcgccctctttcaaaccttgactctcccacaaatctcgcaggcgctcgtcctcaatcttgcgcaggcgcttgacctcggcccgcgcagagtccggccgcgggtcctgatgaatggtagagcagtggtcgagcatgcgtcagcttggctcagggacgagcgcagattagtgccggcagctcacgtcgtagtgactgtcgacgcagagggcactcgtgtagcctcctgccgagcgcaatcaagtgggaggtcagcaatgaggcttgccagtaagaaagagtcgcccgcacggaccgtgaaagttgatccgagcgcctcgctcggtcgccgctcgccgccgaatctcaaccgtcgcaggggcgcgggcccagccgaggtcgttagcgtcggcgagcatgtcgacgtcgacatcgccaaacccgcggacgcgagggatcgtgtcgttgaaagttggcgactcagcgtcgtcggccgactcaatcgcccgctccaccagggcgcccttgttcgtctcgggctggcccttggggccgaggaagagtggaagctctggtaggtcacgcttggtcagctggcggccctctactcgagagcgtggaccacggtgcactcacgcttcgtccgaccccacgagaagccgcgccgcacgccgctcgggatctgcttgagcaagttgtaatgtacgaaggtcggatcgccaaaatggtcgtactgcatcattgtgtggccgcagaagctgcagagatgcgaaggacgtgtcagcggtgggaagaggatgccaaaggaacgtcgcaaggacgcacggtcccgaggcggtgccggtcggcagcgcaccctggccgacgaaacggccaggcacgccccatcgcttgcgaagcgcgaggaaggcaaagcggaagacgtccttgtcgcctgttgagggacgccaacaggggatggctcagcgtcggaagggctacgcaggtgaggaaagcgctcgcaccgtcggaaaagttgaaccagagcttgtactcctcgagcatctggagggaagtggatcagaagggcgcatgtccgggggttgatgagcggagagcgagcgacttaccaacttggagagccagaggacgtccaggtgatacttcttgtcgatgagaatctgcccggcctcctgctcaaactcatccctgcaggtgtcgaggagtcaatcgccagcaaacgtcaagagaatgagcctcgtggttcgtacctgcagcgaacgcccaggatagcccagactaaggatgcgaaggccagcccgtcagcactttgcggagaaagggcgtccgagcgatcagacgggcttactgggattttgcgcggctgtcttccagaagtcgtaccactggaaggcacgcgtacggaggtaggccggtgcgctgaagagatactcggggttgcgcgtcggcacgttgtccgactgcaaaaggtggaggcacagtgtcagcgttggtggaaacggtcagcggcgaaagatgatggtgtgaactcacatccaggtagaggacctcgcggaacgggcagtcgaccatagcgatggcctgaaaggaatgacagggccagatgagcagatgcgacttgagacctgaagcaagagaccaaccttaaggtgatagttcttgcgccgcttttcgtccttgaccgcgccaacggcctccttcagctcggcgccgagctcgtttgcctctttgacgagcggagagtcgatcggcggccgttcagagggaaagtgccagatctgcaccggcagatcgcacttgaagtctgcgtcgtcaagcagaggggttccttgtcagcaggcaggcagagtcgagcggcaccggccagcgcaaagaggacggacgcttccgcagcattcgcagcgtgtagattgcccgctggagcgtgtctgcgttgccagcctgcatgacaatcccgcgaccctcgccatagtcggccatcactccttggtcgtcgagctcccacaggcggtcaatcatccgctgccggtgctcgtggatcgtcgtccggttgaggctcatccagaagttgagcgagttcttcatgatgctgcgtgagggcaatcgaaaaggcgaaggtgtgagctcttgcatgacaaagcttttggagcggaacttactcggacgagtgcgacggccagacgttggcgcacgtcttcatgttctcttgaaaaaagccgccgagctcgagctcgccctcgacttcgcctcgaccgccgggtgcatgcacccaggcgagcagccgctccttcgtcgacgtcctgagcgggagcggccgcgaggcaatgtcgagcggatgctcggtcgtgtcgaggtacatcgcatggggcgtggcgaagggcgataaaggggccgagggcgtcgagtaggctgcatagagctggttgtggacctggcgggtcggttgacggagagagcgtcagctgtctgctctgtcgatggcctccttcgcgctctctgtccgaatgctgagggtctgcgagccctgcagcagctcgtcttcgactcgggccttccctctcgccccctgcctattcctggcccgtgccgtctacggccgcagcctcctgctgcccccccccctcctcggctcgtgcgtctttgacagcccgagctgccgagtcctgctcatccaagcttcccgttgagaagagattgtaagtggctaggggactgacgtcggtctgccaaccgaggccaagcacgacgaggacagcgaggccgatagagaggccgatccagcgcttgagagcgttgccgagcccgccccggccaggcaagctcgcgagcagcttctcgagctggccgccgggcgagacccttccgctcgggttggagaaggacgaccgctgcgaggagggcaggagcgaggcggtcgaggaggctgtcgtcatggctgcggcggcagggcgagagagcggcgctggccggcgggcgggaaggagggtctgagctcgagcgcgacgagctgaaaggtagttgattgtctctctctggctgttgctgacggtatgcgagcggcggctaggcaggcaggagggctgacagggagatgcggcggggggggtcgagatgaagagcttggttcgagggcgaaggagctctaaaagaaagcctgctgccacgccacgcggagagacgaggccgactgcgcggaaggccgccggctcgctgcggcccggccgggaagacgtcacggcagagggcacagggcacagggcagagggcaaaggcgacgcagcagggaggagaggaggagtagtgcgctgctacaacggcttgagggcaggagacgccgcgctggagaagagcgggcacgcacagacgtgggcgagtctgcgctgcccaaggcgtcatcgtttgcaggcttaggaggtgctggccataatcccgcgactgactggtgcaagcgacggtgggtagaggtgacgtctggagaccaacgggcagaccgccgatgagagcggcctgttccttggtggaggatcaatgatgagggactgccagctgccgcacgagacaggtcggcgtcccgtctgacctaatccacacctggtcccttcgattacaagtgggtcgataaaggcgtcttccattcctgcaccgccatttcacctgcccaagatccgtcctagctggccaggtcgagctcttcggagggtccgcctgggctcggcgcgtctttggcctgctgatgagagctggcgcccttggctccttgagagatgacttcgaatggaaagaggtgaggtgagattcgtcagtcgtcgcagcaggagcggcagcccctcctgccgtcgagcaaggccgttagcgaggttcgtcgtcgagggctgctgtgtgcggtgcggctatcgcccggccagccagcctgccagccagcgcgcgcgggcggaccttgaaatcggccgcgcgctgcgaggcgagctgcttggacgagccggccgacctcctcgcggcagacgacgagcagcgaccaccgacccgacccttccctccctcatccctctcgaccccttctcaaaaggacgtcttaccggtcgaatgtctgtgtcagacctccctccgatgtcggacgagctcaagcgcaagcggtgcgtctccttcgctggctaggccaggccgcgcgcctccttgtgcactcgtcctcgtgagaggcagcacatctcctcccagcgtcctgacccgagcctcctccatcacaggtcgccctcgccgcctcggaacggcgtccgtgcccactcgcctccgccctaccagcgccgccggtcagcgtcgcctccggacctgcctcgcgtccacgacgtcgacccggcccggcgccgcgagcgtgagcgccagcttgctctcgccgcgctcgacgcagagtcgtcctccaaggcgctcacgaagcccgacggcggctttgacgctgcggccgagtttgccaagctcgctgctggcagccggacgggcggagcctatgtcccgcctgcgcggctccggcagatgcagctcgatgcgagcaaggacaaagcgagcgtcgagttccagcgtctgagctgggatgccctccggaagtcgatcaacggtcacattaacaaggtgcgtttaagcggctggggtctggtcggcgccgcgagacaacggctgacgcggcgtttccgtcccgttgcgatcccttcaggtcaacacgtccaacatcaagcacgtcgtgcccgagctgtttgccgagaacctcatccgcggccgcggcctcttctgccgatccatcatgaaggcccaggcggcctcgctgccctacacgcccgtcttcgccgcccttgtcgccatcatcaacaccaagatgccgcaggtcggcgagctcctcgtcacgcggctcgcgagccagttccgccgggcgttcaagcggaatgacaaggtccgctcttccccggccaaagtcgaggcccgcaagcgaatgctgacgtgacgtgctggcccatcattcaccgcagacggtctgcatcgcgaccgcctcgttcatcgcccaccttgtcaaccagtcggtcgcgcacgagctgctcgcactcgaaatcctctttacgctccagcagaacccgacgtccgactcgctcgagattgcctgcacgctcacgcgcgaggttggcctcttcctgaccgagcactcggccaaggcggccaacataattttcgagcgcttccgggcgatcctccacgagggcacggtcgagaagcgcgttctcttcatgatcgaggtcctcttccaggttcgcaaggaccgattcaaggacaacccgatcctcgtcgaggacctcgatctcgtcgaggaggacgagcagattacgcaccgcgtcatgcttgacgacgagctccaggtccaagagggactgagtgagtctcgctcgctgcagcctcgcccgataatgaggtcaaccgctgatggtgccctcttcccctctcttgtagacatcttcaagcaggaccccaacttcctcgaaaacgaagacaagtatcagcagatcaagaaggagattctcggcgactcggacgacgagagcggctccgacagcggcggctcgtcgggcagcgagagcgatgacgaggacgccgacgacgagggcggcgcggccgtcgtccccaacgcgcacggtatcaaggacatgaccgagaccaacatgatcaacttccggcggtccgtctacctgacaatcatgaactcgctcacatacgaggaggccgtccacaagctgctccggctccaggtccaggagggcatggaggtgcgtccctgtcgagccgctcgccttgctcgaccgcgcggccgctgacgcctcttcttctgccccgcgccgcagatcgagctctgcaacatggtcatcgagtgctgctcgcaggagcggtcctactcgaacttctatggcctcatcggcgagcgcttctgcaagatcaaccgcgtctggtgcgaaaactttgagcaggcgtttgccaattactacgagacgatccaccggtacgagacgaaccggctgcgcaacattggccgcttctttggccacctcgttgcctcggacgccgtcagctggggggtcttccacgccatcaagatgaacgaggaggacacgacgtcctcgagccgaatcttcatcaagatcctcatgaccgagatgatggagtcgctcggcgtcaaaaagattgccgagcgctttgccgagccatcgatgcaggccgcgttccaaaacatcttcccactcggcaacccgcgcgacacgcgcttctcgatcaactactttaccagcatcggcctcggcgccgtcaccgagcgcatgcgcgagcacctcacggtccgttcctgtcgctccaccctccgctcgaagcccgctgacccttgctcttccgacgagcgcagaacatgcccaagatcatcatggagcagcgacagaaggcgcttgaggcggcctcgtccgactcggactcttcgtcgtcttcgtcgtcgtccgactcgtcttccgattcggactcgtcctcgggctcgtcccgctcgcgctcgcgccggtcctactcgcgctcccgttcccgctcgtactcgcgctcaccagtccggcgcgatacccaccggcggtcgtcgacccctccgcccgcggcccgccggcgtcgctactcggactcgcgctccccctcgcccgttgcaggtcggcgtgagcggcgccggtcgtcgacgccgccggtccgcagaggaggtcgctcgccgtcgcccgtgcggaggggggggcgctcgccctcgcccgtccggcgcggtggtcgctcaccttcgccgcccgttcgtcgcggaggaaggtcgccgtcgccagtgcgtcgtggcggtcggtcgccgtcgcccgtccgtcgcggccccggccccggctacggcggaggcggcggcggtggctacggcggtcctcctggccctggctacggcggaggacgggactttgactcgcgcccgccgccgccgcatctccagggcggcggtggaggaggacgtggccggagcccgtcgcccgtcaacgcccgtcggtacgagatctacccagaccagcgggctcggccgcgggccgactcgcgcgaacagcggtactaagggaggaggagggaggcgagcgtcttgactatcgaaggtccgccttatgtacggctgcgagcgctgctgagagagattgaacgccgctcgacgccgcaaaaagcccctcccccgttggttcgtgaggcgtctcctgtcgtcgctcgccaggcgacgtgaaaagagggagggcccgacctcctcgccgagctccgtccgacgaccacccactcggccgaccgacctgccgagagctgccctcggtcctctacgctcgtcaagctcctcgagctctctcgtagactgcctcgccaccggcctgacagccagcatccaacggggtgagctcccatcgccgtctgtgccagcccccctttcgccgctgcgcgactgatctcccccctctcgccgcgcagcagcccctcccttgagcgatgccgcccgctgttgaccctctcttgctctcaatttcaagcgcgtcaaccacagctgcccacagactcgttatccgggatgcgagggccagcctgacgccgaaccacactcaagagtcagtcgctcagtcgtgcttcagcggggtccggcgcggtaactgactgctgccttcactcgccctgccggtcagggtcacgctcgtacgttcgcactggcctgcttgaacagacgctgctcaaaggctgatcctgttcagtccgggatgacatcaagatctttgcggcgtgctacgtacgactgcgtgctacagagtcccccttttgatcagagtccctgagcctctgactgtcgcccgtcgccgctgccgccacttgcagatcgtcctcatcgccctcttctggcacgtccctttcctctcgtggatcatctacccctttaaggtcggtccaagccctcagccgtcgtgtatgagtggcgccatcgtgctgaaagagatcgtctgccgcagcttttgaccgtcggcgtgcgtcgtattctcgaccatcggctgccgtcactgcgtcctattgctgaccttgctgactgactgccccggggttgcagtttcacgaggtcggtcctcttttcaacagacgaacctccttcggcaactgacaccccctgcagatgtcgcacgcgctcgccggcgtcctgacgggcgcccggatcgagctcatcgagctcgacccggacgaaggcggggcgacgcgcatgcggggcggcataccggcttgtacgctcccggccggttcgtctaatcctcgcccactcccttgccttcgtgtattgctgaacgatgggcaagcgcggcttgcagggtatctcggcagcagctttattggcgctgcgatggttgtttgcggctgtcagtttcgatgtcgcccctgcactgcactcgcaccctgtctctgacccctttaacccttccgaccctcttggcagttgacacgaatgccgtctgtccatcccgttcccctctatcgttcgccgcaaccctcgccctgacgccaagcgccgcgccctccgcagtccaaagtcgcctgcatcgtccttgccgtcttcttcctcccgatgctctggtgggctcgccgctcgtgggtcgcttggctgacgatcagcttgacggttgtcctgctggccgtcttctggctcgtcgcacattcggtgcgtcccttggcgttctgtcggtcgacacacaatagccaagcgctgactgtgccaggcggggcgcaaaacgtcgtcggcagctcatcctccgcttcttcgtcctcttgtctgtcttccctcaaacgcaaacgtctgcccatccgtccgctgacggtcactcttttcctatcctagcatcggcgtcatgagctgcttctactcgatctgggacatcgtcgacgatacggttccgtccctttgcccaactcgcctccgacgtcccgcactgacctcgtcttcccttctttgcaaccggaaagctcgctcgcaaagtccacacgagcgacgcctccgagtttgcagacgtctgcggctgctgcccgtcgcgcgtctggggtgcgtcctttccttgcgccagctcgtcggttcgccttcagccggcacttgtatacaattcatgctgattgctcaactctctctctgtcccttttgtcgacggacggcgcatcctggaggaaaggctttatctggctcgtcaattcgctcgccttcttcggggcggccatcttgatcgggctcgtcgcgttcagtacgtctgaccgcttgcgaccccctccgtctatcatctctactgatccctcccctttcctcttcgtcgttcatcctctcccttcttacttccgttcccccttttccttcccctcctgctagttctgatcgagagcagagcaaggcagaccgaaaggataaaagaaggaccggaagaaggtacaggttcgaagctcgggaggggctgtcgcgactcgacgaaagagtcgacggaggctgagagtcacgtgccaggcgtcctcctgcctcagtctccgttgcccgacgccttggcaggaaagttggctctgctcagcgaaggtctgggcgcgttcgcgaccaagttgcaaagtaaggcgatggtgaccgccgctcaatcgctcacgcccagctgcagcgagccggctttctgcccacgcgaacaggcaccggtcagagaccgaccgtttgcgttgcctaaggtcatatactctctaacatgactgtgctcgctcccctcacaggcggacgagcacgaggacgaccttctcgtccgcgatctccacctcctcctcaacgagcgcctcggcctcggcgctcttttggctgtgttcgcccggggcacagcgcgtctcgcggtagacgacgtcccggttgccgctaatgacgccctcgagccgctcgctcgcaccgcggtagaacaggccggcgtcgtcggtcgcctggaggccggccttcttgcgcagctgctggacggccgagatgaagccgcgggcgaggcccttgagcacgagctcgggcgacgaccgaatgtcaaggacgacaatgagctccgcgtcctcgcgggcctcgttcttgtcgcccatgccgccgtggtggtcggcgctgccggaaaagtcgaccgcggccgagaccgtcaggtcgccggtcgtcagcgtctggccggcaacgtcgatcgtgcccgacgacttgaaggcccggacctcgtccgacgagagggcggcgagcgcggccttgaccttgggcatcgcgccccggagccggcggccgagcaccggccagtcggccgaggccttgtacgtcaggttgacatcctcctcgcgcgacgtgtagcggaccgactcgacgttgagctctgagacgaggtacgactcgagccccttgacgtcggccaggtactcggcgtccgggtggaagacggtcagctctgacagcggtgtcgtctgcaagggcagagaggtcgagtcagcataggcgcctgcgcgaagctgcgcgcgcatgacggaccttgaggtcgagacccttctcctcacgcagcttgcgggcgacattgatgacagccagcaggcgccggacggcgacctggaccttctcgtcggcgtaagcagccttgggctccgggaacgagagaaagtggaccgagcgcgtgtcgtcgccggcgggggcggcaccctccgggataaacggccgcaggcgctggtagatagtctcggtcatgaacggcgcaaacgacgacgtcgtccggcagagcgtgaggagggcctcgaacagcgtgttgagcgccgctcgggcgtcggccacgccctcggagcccttcatcctccgccggttgaagcgaatgtaggcattcgtcaggtcctcgatgagggcgatgagctgagggatgacggtgtagagccggtaggctacagggcagaagaggcacgtctcgtcagcagtctgcaagatagagtcgggcgaagccaagacgaaccgtccatctcggtgtggacgcttttgatgagcgtctggcagcgggcgaggacccagcggtccataacgttgtccgaaagcctggcctcggggtcgtacacaaagtcgacgccgtgctgggccttgagcagcgtaatgtgcgaggcgaggaagttgtacgagttaagccacgggatgaggacgcgcgagaggacgagcttgacgccctcctccttaaaggcgaggttgtcgccccgaacgacgggcgagttgacgaggtagagacggacggcgtcggcgccaaacttctcgagcacgtcgttcgggtcggggaagttgcggagcgatttcgacatcttcttgccgtcggcggccatgacgaggccggtgcagatgacgttcttcatcggcgcgacgtcaaacaggtgggtcgcgaggacgaggagcgtgtagaaccagccgcgggtctggtcaatgccctcgcagataaagtcggccgggaagccgccgtcgccgtcaatcttttccttgttctcgaacgggtagtgctgctgggcgtagggcatcgagcccgactcgaaccagcagtcaaagacctcctcgatccggcggagaacagtgccgggcgtcttctgcgacgggatcgtgatgtcgtcgatgtcgtgccggtggagctccttaaggccagtccggcccgagaggcgctcgagctcggcgatcgacgcgacgcaaacgacctcgctcatgtcctcgctcgcccagagcgggatcggcgtgccccagtagcggttgcgcgaaatattccagtcgcgggcgttcttgagccagttgccgaagcggttctcgccaatgtagtcgggcacccagcgcgtctgctcagcattgttgcggacgagccggtcccggatctcctcgacgcggaccatccaaacggggatcgccttgtagaggagcggcgtcttggaccgccagcagaatgggtacgagtgcttgatgacgctctggacgatgagccggccgcgggccttgaggtcgcgcatgatggccttgtcggcgtccttgacgtagacaccctcgtagtcgggcacctcactcgtgtagcgacccgcgtcgtcgagcgggcagggcggcatctcctccttggtgacgatgccgttggcgacggcgacccggttgtcgtcctcaccgaaagccggggcctgatggacgagaccggtgcccgagtcggccgtgacgtacgtgtcgttcacgacgcggaacgcccggtcctcgtactgctcgacaaagtagtcaaacaggggttcgtaccgccagcccttcatatccttgccgagaaacgagccgaccttcttccagcgggccttgtccttgccgtttgggtccttgtagaccgagctgaggagggcctcgtggacgataaagttctggttgcgctcgacgtcgtggattttgaggtaggtaaagtcggggtgggcgcagatgccgaggttggacggcagcgtccacggcgtcgtggtccagatgagcaggctcgtcgatgggtcgtcgacgagcgggaaggcaacgacgacggcagggtcgttgacgtcgcggtagtcggacccggcctcaaagttggaaagcggcgtcgtgcagccggtcgagtagggcatgactttgagaccgcggtagacgagccccttctcaaagagctgaccaaagacccaccagctgaaggggaggagagaaggaagcggtgtgagtgctggacactttgtaagtgcacaagcgcacgtgcgcagcagagagcgagaaacgaaaggggcgacgcacaccgactccatgaacgtcgggttgagcgtcttgtagtcgttctcaaagtcgatccaccggcccatgcgttcgaccgtcgacttccactcgcctgcgtaacgcataacctgtcgaggagcagggtgcgtaagaagagtgtcagcgaaggatccgaatgcttgcgccaatcgcctctcgccgcgacggtgcgcagagacagagcagacgtacaatagcccggcactcggcattgtaggcctcgatgcccatcttgaggacgtcgttcttgccggtgatgccgagcttctggtcaatctcgtgctcgaccggcagaccgtgcgtatcccagccgaagcggcgctcgacgtggtggccggtcgagtgcgcatgccgagtcacaatgtcctggagcgggccgagattagcgcgcgagcggaaggaggaaagtcgagcgtcagccgcatggtcgtgactcggtcgacggtcgacacgcctggcgaggcaccagcaggcgccggaatggctcgagcaggcagagtgctggtcgtgctacgtcctgcggctccccgatgcgacccctgcctctcgagctcctcgctgtgctagcctggacgcggcacgcaccttgatggtccctgccagcaggtgaccgtagtgcggcaggccggtcgcgaacggcgggccgtcgtagaaggtgaaccggggcttgccctccgactgcttgagcgaggtttggaaggcatcaatgtcgcgccagtactggaggacgacgtgctcctccttggggaacgagtacggccccgctacaagcagagcaagcgttcggtcggtcgaggacgagcgagctcggtcagcccttgggagaaaggtccgagcagcgacgctcggcgtcggtcgtcacgcacgggtgggcgcagggaaagacatggtgtttttctcttgcgagtttgctggcgtcgccctggcaaagggacgagacgaggtgggtttggggggtcgggacgaggggaggtcaagggacggcgggtccaagaagactggctgctgctcggagggacgacagggcgacagcagggccgtcaccgacttagggttaagcctttttcccgcacggcagagcgacgacgacgacggcgctgacctgccgacagcgacgacgtactgcaggagagagctagatcgccttggaccttcgtctcgcatacacagcctagtcaggccagcacccttagctactcagcatggtgcgtcccgtgagcttgaatcggtctggcggcgtcactttgggctgatctcgctgtgcgatgcgccaacaacgcccccccccccctccgcagcaggccgccgccgccgcgtcgtcctcgaccgaccagctcgccggctcgacatcgtccctcccgcctcgtccgccagcagccgttctcccagccgagctcgaggcgctcctcggtccgctcgctcaggcccggtcggttcttggcctgctcgtcctggcgcgcgcaggctcggctgctgctgctgctgatgctgcgacggcagcgcacgctcctccgccaaacgagctgacctcaagcgatgggggcaacgacggccagccaccgcgggaccagacccgagcaagtgtcccgacaccgatagaagggccgacgatcgtccaggctctcggtgcgccgttcgaaggcgaccatggccgagcatacgcgcttcgcgtcgccggcatggtcgacgccgttgagcagggttgcgtcggcaaggatggttcaggcgtgcgtcctttcggtcgctcggtgccgctagctcgttgagacccggcggcttacctctgtctgatgtcacacgcccgccaggacccgctcaagttcctccgcatcaggacggccaagcacgagcttatcatcaccccaggttcgtccgccgccgtcgccgccagtgaggcgtcccggggtctggccaggaaggtaattaacgtctgatgccggcttgccgcccttttcacccgccggcagatgcaaactacatcctcgtcgtcctccacgacccggcgcagtagcgtcgacgccagccctacccctttcacatccctccgtgatgccggcgattgagcagaccaaaacgaccggtccatcccttggcgagtcgcgcgcctggtcaagctcgagcgcaagagcgtcactggcttgccctgctgttgcacgccagccgctcgccaggctcgcgcatcgcggcagaggacgctcttgagccagatgcgcaactgggcttccagcctccttgtacgagagagcctccttgtatgagctacagctcgctgttcgcagctacgaagattctgatactttgcctgtaatcgtactctggaacaagcgggcttgcttttgcatgcacaggacaagggtcaaagcaatcttgcaggagaaggcgtaaagtcgatctggctaagcgccgttggccaacataccctagcccatccctgcctccagcagttccccatcccagccctctttccccgtgaccgagcgcgcgaagcgcagagttgcagcccgagaccaggccgagcgtaggagtgccagaagaactgaccggtcagggccgcgccgacctcacgcatgttcttgaagtgcgtgcggaggtactcgccacgggccttggcggtcttctccgggttggaggcaagcggtgcagaggcgtatcggacctggatttgatagaagagagggtttcatcagcttggtgtcggactgtcagagtgcagaagtggctgggcgcgcaccatctgaaaggcaagccgaccggacgaggagacgcgacgagaagcgcaacgggaagagagggagtgcgtcaggacgctggacacctgcagagttcgtctgcgagggtggcaggaggcagtaatgtcaggaaatgggcgctctcgtttgagctctttgcagcctggttggcagagcgcgaatagggtaaacggagaaacgtctgattgaattctagtaaggctcgtgagccagcgcagcgggctgtgcgaacagaggggtttatgcaaacgaggcatctcgtgcgaacgaggcctgtccgcgcaaagcaaacgaggactctccgcgcgcaccgactccctcgctcgagtcaaagcccctccgtcagcgccattcgagctgatcacctcgctgacgagcacatgctgaagacagtcagatgcgtcatgtgatcggagcctaaccggctaaactcgagcccggcccggcagacacaagacaagccgcgccctgcccaacacctcccgcatcccgcgcgcacaagttaaggcgacactcgtctccgagcgagcgaactgggcgtgacagacgaagtctgttcaggtcgctgagatcaaccgagagaagcagcgccaaggcgaagctagggcgagggcgagacgactggcgggaagagggagatgggcctgtcgctcgccgggcgcttgcgggtcgcccgccaccttcggtccgcctcgagcagtcagccatcagacagcagtcagcagggaggctacttgtttcagagctggcttgaggtcagctgagccgaccggcttgaaggatcagccgtcagctgccgatctcaaccagcggggcgagcagggcgggccgtgaactcgccagccgaggttgctgggctggcgctgacggacgcgacggccggccgagacgactgttgctggagtggcgagagacctcgcagcttcttgggccgtgaagatgaacgagagaagactctgtggtagtgaagggctgggaagggagatggggaacgggaggaaggaaggagggcgagcttgcccgcctgccaaaacggtcgacgcctgccgccgcccagccggctgggagagtcgagccgcctgctcggccgggctccatcctcctcttgcccccgaacgagtacctacctagacagctagacatacagaacagacgtctgactacctgatggtgtcaccctggtggtatgaagtgagcggcaacgtgctcaaacggaaatggcaggcgctcgaacgggtcttgacgaacccctgcgtgcgaatagccagaacgtccaaacggcgcactatattcgcccggccaaacgggctcgaacgcccctgcgccccgcccaaagggccaaaaagtggccaggccaattccctgcctgacaggcaggaaggtcgactcctgttctgagccgggaccaagaggaagaagtgcgactccttgggatagaatgctgcgatcggaggaagcgtctgatctgccgtcggactacgttcgcaggaccgtcctgtgatgacagcggagcggttcggggccacggcccgagtgcaggcaggtgcacgtattctgggtcatggggcagtaccgagcgcccctctgtcggggcagtccagctgcattaactctgcgcttgcttgcctgacgcgccctttaccgcgccgtggcacgcgctttcgccgtctgtgtagctcgagaagccccagcacgccctcggtcgagcgatctgctacctgcagctaagcctgccgacctcaaccttcgagcctggcgagtgacctgccgtcgagcgcctcctcctgtcctgacccgtcgctcccttctgctcgcaaaggccgaccatgccctgaacccatgcaaggtcgcaatgaccaaagagcgtcaggaaacctcatcaacagacgtgaactcgcttaggcctcgatggcggcgatcgtctccttctcggccggggcagcagccttggtgacgctcttgcccttggggacctggacgtcggcggtgccgaggatgatctcgaggtgggtcgggtggcccttgtacgggttgatgcgaccgtgagcgcggaacgtgcgccggtgcgtcttgggagcctgctggacgacaatgttggtgatgaagaggtcctcggcggcaatgtccttggcctcggcgttcgactcggcgttcttgaggaggccgaggacgacacggaccgacttggcgggccagcgacccttggtcgtgccgaactgcttggcctgcgaggcccggccgataccaccggcaaagcggcggaaggggatgacctgcttgtgctcctggacgtcggccaggtaggcgtaggccttcgtgagcttcatgcctaaagagacgagcagcggaaggggatgcggagcaagtcagcgactgctacgagacaatactgagccccggtcggtcgtcgtaagtgctctgcgggcgactcgcgcagatcgtgtccgtcgcttggccagcccctttccctctcgccgtctccagcagttccccatcccagccctctttccccgtgaccgagcgcgcgaagcgcagagttgcagcccgagaccaggccgagcgtaggagtgccagaagaactgaccggtcagggccgcgccgacctcacgcatgttcttgaagtgcgtgcggaggtactcgccacgggccttggcggtcttctccgggttggaggcaagcggtgcagaggcgtatcggacctggatttgatagaagagagggtttcatcagcttggtgtcggactgtcagagtgcagaagtggctgggcgcgcaccatctgaaaggcaagccgaccggacgaggagacgcgacgagaagcgcaacgggaagagagggagtgcgtcaggacgctggacacctgcagagttcgtctgcgagggtggcaggaggcaggcatgaaggattggcggcggcgaggcggagtctagtcgaagtcgaattcgggtcgggcgagcgagcgaccaacggagacagcgctcttgctggacagcctggaggaccggatccgtgcgacagcaggccagaagcgcgcgcgagtgacgagcttctgtgctgccagcctgggagcttgccagggcgagcgtgcctgctcggccgacagcacgagtgccgactgctcaggcagcagctcccaacgtcgtccctccgtccctcagcccggctggacgctgagccggcatgaccctggccaagctggctgagcgcctgccgacctgacctgcccctcgcccggcaccctgctgctcccaatcgcgcgtgtgcctggtccagactccagtcctggaaagcaggcaggccggtgccagctgccccgaaatcgagctcgaggtgtcgtctgctccgaccgagttgaccggccgaacccgcgtgttgaccaacatgcctggcctgacctgcctgcctgtgcagacgaggagtgtaaaggtgctcccacctttggaaactgtgctgaaaaggtttggcttgacgacgacggaaacaggggcagggaaggcgaggcgcgggcgacgaacttcgtgccgccagcccggcggagcgcggccggccgcagagcgacgcatgctcgcgcggagccaaggaagattgtgcagatgcactttagccctcgaccgctcctctttccccggagaccggccctaaagaaattcgagcttgagcagaagtcttctggcctgctaccgatttggccgaaaagagggctgagatgactgggcgtagggacattcaagatcgtcaagtgagaaaaaaggagctgtcgcagttcctgtagaaaaggtcgagtatagggaggcgcccgccttcagtggcccggcggttcgctctcgccctctgggacggtcgttgccttctcccccggcggcagtgcgaccgcctgcctgcccatcccgccgttggtgctcagatgccggtggagcgcatcatggtcgtcctcaaacgtccctggcttgagcgtttcctgctttcggaggacctggagcggatcgtcggtctgctcggcgggcgggccgtgcgtgccggtcgggcttgacgggcgggtgatggcgatgggcgggcatgccggaattggtgtgcggatccactgttgaaggagagaagcgaaatgtgagcgggtcggcaagcagacggcagacaagcgtgtacgcacggtcgactcgagtgcctcggcggctgacggccgcttgtgcgggtccggaatcataaggaagcgcacgaagtcctttgctagaacggttaaagaagaggggcgtcagtccagaccttcgtatccgcccgacagataggacagggaccaaccctcctccgagacgccatcaaagcgcctgcgctcaaagttgaccgtcttcatccggctcgtctcctggacgaggtcccacgggtccttcgagtcccagggcgtcgagccgctcagcctgagcgagcagtcgccagacgtgcacgggtgttcagcgtctttctgcgagtggaaaaggcgagagaagggcgctcacatagcgtagaggacgacgccggccgagaagacgtccgagttcttgccgtagcctgtgcggaggaagatctcgggcgctgcggcgtacaagagcgagatgagtcagccaatgtccacaacggtgaacgaacgagcgacgcttgccgtctttagtcgcagcagcgcacagcggaagcgagggctagaatggaaaggaaactcaccggcataaccgggcgtgccgctgacttccttctgtatcttcgggtcgtcgtccgagacgccgtcgaggatctgaatcacgagcgagacgtaacgtcaagagcggaggtgagcgtcgaggaagccgctcagctgcgagcgcttcgaacgagcgaaaaggcaacgggacgcacctttgagatgccaaagtcaatcagctgaaagtcgtcaacctcgctctcgcgcgtcttgtagaggaagttttcggccttgatgtctgcgaggccggagaaagaggtcagctcgtggctgagcggacgcggcgtcatgccaggcggtggtcggtcgctgagtccgaggcaggtcgtgcgacaccccgctcggtccttgcattccccacgtcaacggtatagtcgacagcagcagacccgctgagatcgtcacgcgtcgcctgcgcctcaggagcaggacgcggccctgcgaccattgcccggaaggatttttgttgcgagcatcgctgggagacagaggcagggacgtacctcggtggatgatgccctgagagatcaggaatgcacagggagtgaagcattgaaggtcagcgttcgaagtcggcttgtaagccattgcgcgacaaacggcgagctctcgcgccgtacagtggggcgaaagccagccgcagaaagagagagggctcgcacattatggtggatgtaagcgagcgtctcgaggatgttgaccatcgcccttcttgcctcctcttcggtaaagcgccgcttgtcgaggatccgctgaaggagctccccgcccgtcaggtgggggaacgtcaggtagtagtgattgaccgactcaaaccagctagggacatgaagaagggaaaaggggtcagttggaagcacaaccaggaggcagtcgtctcggcgacgcctgctgttggctgcaaggacgaactcaagtaagggcgctggagtatcgggtttcagcagatgactcgtcagccttcaaacctcactcccagccaagcgcgcataaggcctcgaacggaggtgactcagaggactaaccgatgtgcggatgccgcttctcgagtacctgaccccagccgacattgatgatgcgcctgcgagggtcaggagcgagtcggttcggcgcgggtccgggaggggcaacgatggcagcgacagcagtgacagagcgagcgacgaccagacgggatggcgagcataagacggaaggcagagggcacaggtgcgaaagagagcaaaaggaagagagcaaaggtaagacgatgttgcgtcagccctcgacgaacgacgccgcttacacgatcccaacctgccagatgcggaccgcacaggtacttctccttatcctcgacgaccgccttcggcacaatcttgacggcgacgtcgagcccgtggggcttccagcgggcgagccggaccgtcgcgtagccgccttggccgagcgggggtacgtcgaagaacttgtacctgccgagtgtcgggacggcggggaggatggagggaagaggaggagggagggtgagagagggaggcgcagcacgcaattggacaagggaggaggtgagggtagtcagctcgcgcctgccgtaactcgagccgagaaccaggcgggaacgcccccctacgacccctaccctgcccgttcaaccgcttcggcaggacgtagatggcgctagctgtccaagagcgagcgatggcgcttctcgcgagcgtgccctctgacccctccgccaccagctcctcggtcgaacgccgaactcactcgcgcttcttgatctggctcgcgggctgagcactggcgtagaaccgaccgtcaatcccgagaacgtcaggcaacgagtgggcgtcagctcgatgatcgaatgaaggacgcaggcagggcaagtcggctcgtctgttgcgggccgggcgcgggggagccggcgttccccgccgccggctgagaggcgacgccacctgggctgtggtcagaggtgggaagggacggacgagaagctgtgtaggagctgggcaaagtaggacggcatcgtccggacagtcgggcctgctctcttatatgctggcgtgtgaaggaaggaagaggtcgtcgttgacggctcgagctcgtcgtcgtctcgtcgcccgcgatcagccgaaacgattcgggcgcagtcgactgacgcctgctgacttgaccgtctgacggccatctcgacaccatggctagagggctgacctgcactgaccccttttctgtccgactaaacgctcgctcgaccgctgaccgtcagggcgcgcccaaccgagacgcctgtggccatttccatcgcgtgtcgacgtcagtcagtccgtcgttgagcaaaacagccgtgaccttcctcgtcaaaagcgccctcctggcaggaccttcggcctcgtctgcctatcagaccggaaacgcttcgactgacggaatacacgaaagaaaaggtcctgaatccctctcgcacgcggacgagtgagggtccaactctgtcgctcgatgaactcgcagtggccacctgacgtcgcttccgcccgtcgtcgaggtgccttcattgacgctgctctctctcaacaggccaccatccaccgccagccgaggccaacaagcgctcggccagactgtcaagtctcacggggcccgtcgtcctacaagccaagccaggcgtcgttgactgactagttgaaacaaaaccgcatttcttgaagttgtgtctcccgtcgtttttgcgagcgctgcgtctgatagcctcgcatgttcgtctgggctgaccgccttaccttgcatacgcatggcacgttcgaagttttgagttgaaggaacgatcataagtcagttttgagtagactgtcacgagtgaaggcacctctgagccatatctctcgagtcggatcgattacatgcaatggttgaattgaattcaaaacgagatcaagggctacagtggaggaaaagatgcgagtgtagggaaggtcacgggaggactacaaacagacgggggcggaaacgtgagaaccaaacgtggttagcgccgggggcggatgtcggcgatgggcgtctcgttcagcggaggcggggcgtcctccatgtgtccctgagcgttgcggtagcggtctgcgggcagggcgacgtaggcaaggtcagcacacgagcaacggcgtggtaaggtggaagggaagtgtagagcaggctagaacgtacacttgaactgtgcaaccttgccgttcgtctcgagctgggcgtcgtcgtgccacggcatgacgagcttctgggtgccgtgcagctgaagggccgggtcggccgcagcggctgcgcgggtggctgcaagcgagtaagcaaacagggacgggtgcacagggcgtcagcctccagaggcggtggagcagcccgtcggcaagcaacggcacgagggagtgaacgcactgccgaagaacgaggcgatgccaatgacgccgaggaccatgccgacaagggcgacgcgcgggacgcccgacttgggcaggcgctggtgcgcagaggtggtggcgccgaggcgctgtggcgggcagggaaggtgtcagcgatgggagatgcgatggcagcgatggaggtgagcgaggtgctgcgggagaagcgaaagacgaacggggttggcgtcaacggggtgggcgggcatactgtgtgagtttgtggtggtggtgttgctgttggtggtggtggtggtgatgatgggtgatgaagatgaacaaccttccatcccctcgctcgctcccttcttgtagcttcgccgccctcagctgatcgatccagagcctcgattcgatggtggcttcggcggcctccgcggcggtggtggagcgtcgaaatcgatgacacggcagcgtcgagggccgagaactccacccaacggaatttagctccgatcctcgcaagcacccgcgtcaactcgcacctgcacttcaatcaagcgggattttggaccgcctccttctcgtcggcgcgcgcagtcgtccctcgctctccctccctccgaaccaacaacccgctgcttcagcatgtccgcccagacagccgccaacgccgctgctgccgctgctgcacggccactcatcggccatgtcgatacgacgaggtccgccgcggtcctggactgtcttgtcaggtctgagctgccgagctgacgcgcctctctgcccttgccttgtctctctctctctcaacccatgccctctcgccctcttgctcgtcggccaggctgcacatgacgaaggccttcaacgcggtcgagtcggtcgagtcggtctgtccctcgttgtcgtcccttctagtcctcgggccttctcaccgcccgccgactgaacctcgttcgccccctctgcgcgctctcttgaaccagcactatacttccgtcgcagcaacatatcgcaacccgcacttccagggcatcaagaaggcgtttgtccctctgccccttcgtctccaaccacacgtacccgttcaactaacgcactggtcttcacgctcgccgcccccttaggctcttcgttttcctcaaccgctggtacgcagccgaaggccacgcgcgcttcgccaaagccctcgacgccgaaggcgaggcgctcgaccctgcgcgggcgagcagcctcgctgtcgtggaccttgcgtgcgggagcggggaggtgatggagtgctttgaggagtggcatcggttggggaggggaggagaggaggctggtcgggcggaagaggaggaggaggtgacggaggcgatggcgaaggcggatctggcgtcgtcgacgacgacggcagcagcgccagtcgcagttgctccggcagcgacagcgccagcgccggcgccggcaacgacgattcacccggcgctgttgacgaacctccgcgcgccgcttgcctcgcggccagccttcatcccgcccaaccggcgacgtgcggctgctgcacccgctcccgccgccgccgccgccgctgcttccctcagcacgtccgcctccgcttccgccgcctctgccggtccctccacgccagcgtccgccgccgtctcgcccgccgcgcccgtctcagcctttgccctctctgtccccgcggctcacacgcccgcccacaaagcgcgtgacgcgctcaacggcggccagtacgcctcgctcgtcgcgccctcgccgctttcgccctcgttcaaacagctcgaggttctcgcttgcgatccgtttacgctccctgccttcctcgcccgccatccgacccacacgcccaagccgctcgccctctccttcgcagacgtcacggccggcgcgcttcctctcccggcaagctacccaccgaccgagctctacccggtgccgaagtacgacatggtcgtctgctcgtttgcgctcaacctcgccgaggccgaggacgagcgggccgagcgctgggagggcaggtcaaagagcctcgcgtggaagttgatctgggagctgagcacgaaggcagagtggctcatcgtcctcggcgcaaacaagcggccagaggtccgtcgactccctcccccccccgacgactcaggtgcgtctgccagccgttcctcagctcatgctttgtctgtctcgccggcgactgaggctgctccttccgttgcagctctggcgcgacaccgagtatgtcaccaacaagattgccctccacattctgagcggcctcctcagtcagttctcctacgtccttcgtgatcgccactttcagctgctgacgaactcccgtttgcagacggcttctcgttctggatgatcgacaacactgagatcggcctccagctccgcctcttcaccgttctgcagtgagttctcgtccgatatcagccgctacttccgccgcctgcgtgcgctgacctctggatcgactcgtcgctcgcctcagattcgtcctcgtcgcccctggcgtcattgcccaggtccagccaaagttcatcgccaaccgtgacgtatttgaggcccgcgagaagaaggccaagctctacagctggaaggccttcatcctcggcgagattgtgcgtccatattaagagcgatgggctgagcggcgtgcagagactgacctgctccgcgcctccttcacagacggccgagatcccctacctcctcatctgcggcttcctctactgggccacctggtacgcgacggtcggcttcagtttccgggcagacgtcgtcggccctgtattcctccaggtacgtcgagcctcgtgccgaagagcgttgagtcgagcctgacgccttccgcccgcagatcatgttctacgagttcctctacaccggcatcgcccagatgattgccgcctactcgccgagcgccgtctttgccgctctcgtcaacccgttggtgatcaacgtaatggtccttttcgccggagtttttattccttacgcccaactcaccgccttctggcgctactgtgagtcgtcgagaccctgtttcgcatcctcgagaccctgtttcgcatcctcgactctctgctgaccagcatcctacctctcctcagggctctattatctcaaccccttcacctacctttttggcggcctcctcgtcttcccggtctgggacgtccaggttcagtgcgcggttgaggagatggcgaccttcaacccgcctgccggcctgacctgcggcgcctaccttgagacgtacctctcgatgagcccgccgggctatctctccaacccggtgcgtgtccgactcatgtcaaagctcgccttccgaggtcacctccctgacgcctctgctccctctcctccctttcgccttaggccgacgccgccaactgcatgtactgcccagtcgcgactggcgcagagtacctcacccagcgcaacctctcgcgccacatctacggctggcgcaacatcggaatcaccgccctcttctgcctgtcgtcgtacgcctgcgtctttgtcctgatgaagctccggagcaagaagaccaaggtcgccagcgtgcgtactctttcttacgacctggcgtctcgctctcgctctcgctcgaaatgctgacctcgctctcccttcgccatccagtgagcgcgcccggcctgcagatagggctcttcggccgactcgctcgctccagcctgctgagagcggcgatttgcatcccttccatagattcgtttctttctctcttcatgtactcccatcgcattctcccaactgcactcttgccccggcacccttccgacccccgtatgctctccaatgcctcgctatcctcgttcctcgtcagccgacgtgttgcgagctgcctcgaaacgccaacagaaccgcccagcatacgcgagagtcggtctgctgccgtcccgaggtcgaggcccattgcctcgctcttgctctcgcgtcggcaacgcttcacaaccgtcgccgcctttcggccgaagagccggcgaactctcctgggcgcgggcgcgcggaggcagaaggggcttgctgcgcggcggcctgtcgactttggccgcgggacctgcctgtgtcgtgcgtgctcacgcagtgccctgtgcccggccacctccgcccctggcagcagaagcaaacgagatagaggtcgtctccctcccgacgcccacctgctcactgacccagtctgccgctgccgaccgtttcccgttgacgaggctgacgcaaagaaggaacagaccctagccacggtcagccagcagcccgctgaccagccccgccccgccctcggaagcagcgtcggccttttgccaaccgcagccgcttcgcgctcgttcggccgcctggctgggctggcgagcccaaaacttcgaaccgcctgctgagcagccgcccgccgggcgaagactccgacgagcccggtggccttgctttcggccggcggtcctgactctcccaattgctcaccgtcctcctctcctctccccaccaaccagcacctctaccctcgttccgcacgcacagcagctagcttctcgttctcaagctcgcgacccggccgaccgcacccttccccctccgaccgcaactctccagcatgcacggcgacagccgctctacaagcgcgaccgacctcgacctcgagtcgtcgtcgcaagagcgcgagacctcgggcaaggcgtacgctgagggcatgacgccgccctccgcctcccagggcgttgacgaggtcgaccacgtcttcggcgcccgcccgatcaaaggcgggccggattaccgtgcggtgcgtgtcgtccttccttgctgttgccgccaccacctcaacccaacgacgtctgccgccgtcgccagcgccctttggtcacagctcctacgtccggggctgttactggaaggcggtgcttcgccttgccggtcgtcatttcggaccgagcaggctgggtcgtgcttactgtcgagctctagctgacgacttccgcgcttcctgctccaaagctcggctggcttggaacctcggtcctcatgatgaagactcagatcgggctcggtgtcctcagtctgccgaacgtgctcatcacgctcggcatcgttcccggcatcctgtgcctgatcgccatggtgcgtctgctgcgctgcccgctcagtatgggcctcggcctggccgaagcgtcgagactgaccccctgtgatttggtttgctctcactcgccttcgaacaggctatcatcaccggctggagcaattatgtcatcggcgcgttcaagcggcggcatccggaagtctgtgcgtagccgagctggccgagcgacgacctccgagggtgctttcgctgacctttagccctgcctcttagactcgattgacgacgtcggcttcctttttgccggccgctggggtcgtgaggccatggccgtgatcttctgcatctgtgcgtccctcctgtagcttctctccgagtttcgcctgctcacccgaacctccttccgcgcctcgcagtcatgattatggtcgtcggctcgggactcctctcaatctcgattgcgctcaacgccatttcaggccacgcgacgtgcacggccgtctttgtcgtcgtcgctgctgtcgtcaccttcatcctcggtttgtccggtcctccgcgtcattgtcggtctccggtctctcttggctgacgcctccggccttgccatccgcctattcagcgagcatccgcacgctcggccagatcagctggcttggatgggtcggactcgtctccagtgcgtgcgagcaacttgatgagtgctacagatctgcggtttcgactgacgcgtcgctcattttacgcagtcctcgccgctatcattacgctcaccgtctcggtcggcgttactgaccgccccgagcgggcccctcagaccggtccctgggacaaggagatcatcgtcgtcggcaacccttcgttcctgcaggccatttctgccgtcagcgtcctcgtcttctgctacgccggcactcctgctttgtgagtggctccaatcggagcttctcagccgcgcttgtgtgagaggctgaccctgctcccgcctcatgcagctttggcatcgtctctgagatgcgcgagcccaagctctacacgcgagcgatgctcctggcccagagcgtcatcaccggtgtcctcatcgtgcgtcttcgtcacgccctctgcgagcgagcgtcgttctgacgaaaggacgagtcgcttcaacaggtcatcggcgtcctcgtttacgtttttgtcggccagtacgtctcgagccctgctctcggcagcgccggtccgcttatgaagaaggtgtcctatggactcgctctgcccggcctttggtaagtccttcttattccccgcgtgcaagtcgagtcgatctgaccttcgccctccttcctctttatcaccgctcagggtcacctgcgtcatcctctcgcacgtgaggcacccagcgccctcggcagcttctcatctgacacttcgactgaccctgcttgccgtctcttcagctgcccgccaagatggtctttgtccgcatcctccgcggctccgagcacctgacgtccaactcggcccgtcactggatcgtctggctctcgtgcacatttacctgcgtcgccctctcctacgtcgtcgcaagcgccgtcccggtctttagcggcctgattggcctgatcggcgcgcttttcggcacgctcctcaacatgcagctgatgggtgtgtcgcctccctcccagagcgttgataatgaggcccttgctgacctcctattgcctctgcaggcttcatgtggttctacgaccacttccacctgcgcaaggttgacaagtcgctcaagtatcggctcctctttggttggagtacgtccccccgtcccgccaggacccatccctcggctgcatgctgaccgaccccctcccctttccacccaaagacgctttcgtcatcgccatcggcaccttcctcatggtttctggcacgtatggctcaatcgtcgacatcatggacgcttacaagaagaacggcgggacgacagtgagtcctgttgcgggccctcccgcctgctttcttcctcgcgtagccgctgactttgtgtccctcccgactcgccgctctagcccttctcgtgcgaggacaactcgcaatagccggtcgtgcgacatgttcgccctcaaggaccgataagcgcgcacgagaagcaggagagagagggagggcacacctcaaggaccagactgttgtatcggaccccccccccccctctatcaaaaaggccagcgcggcagtccgcgttgttccctacgtccttcactagataagacgattttgctgtaattaaattgcaattttgttttgacgggtcggcgagcggttgtgtgtcgatcgaggcgaggcgccaacgaaggctactcgttcagtgtctccgtggtcgcctcctctcgtcccacgtcgcacgaaccgtcgtcccttttgttcgcaaccttaagtttgcagccgagcactgtaggctgtcgtccctgacctcagcttagcaattcgcggggctagggtcacaagtcgcacaccatcgtccctcatcactcagcacccacgcccctttcacggctccctccagcgccggagaagcaagcgaggatcgactgaaagctcatgaatgtcgtgagggacggtcgaggacaaggggcagacggaacgagacagatgggtcggagagggtgaagagtttaaacaggggttgaagagaagggaaacagcgaagcgctcagagggaagtgttctgagagccccgaaggagggctctcaagagaaattatgtattgactgcgtaggctgctcctttgggaggcgcgcggcgccctagtcgagcttggccgtagtcggggccgagtactgcttgcgggcggcccgcttctggagcgagggcccgacaaactgccggtaaaggacctcggcgccgcgggtgccgggcagctggagccaaaggaggaaggccgacttgaagacgtagtagaaggggacccagtctagaacggaccggccaagagaggtcagcgtcggggcgaggataaggggaggctaagcggagagattgtgtgtgcgcacagaggatcgggcggacggcgatgtactcgaccgcggtgagagcggtgaagacgacccagtagaagagggcctgggtgtcgtcctcgtgtccggggctctcgagcgcctggatcgacgtgtagatcgggaggaccgagccaatgacgaacgagagcgggccggcgaggcccaggacgttgaggaagagagcgagcgagacgaaggcggcgaggccgaggaaagagacggccttgggaagcttggtcttggactcaaagtcgttggcgaactggtacttggagagctgagagaggatcggcagagagagggacacgtcagcgagaggctttccggagaaagcacatgccaagggcgacagacctccttgtcgaggccggcaagacggtagttggcctgctgggaggctgttcgagcacaaatagactcgtcagaatgccaattcaacgcgagacgccgacccttgagagcagggggctcaagggacgaagaatgcaggaggcgtgcgcaccctgctggacgagagggtggctgagaagggcctggacgcccgagggcttgtgctgggcaggggtcgacatctgcaggagaacgaaagacgggggcaggtcagcgaagagcaggcgagagcacccaagcaaggaccggccgactgctcctggcttgtgccttggcgggcttcggaagacgagggagggctggtcggacgaccggtgacgaaagcgcttcgccacggcccggtcgccgtctctcctgcctggaccatgcctcggacgaagtcgctcgatgcaagagcagcaaggttggagccagcggacgaccagaaggtatcggacgtactgttgggaaaggtctgcgagagaggagttgcaagaggatgtcgcggaaggtgactgttcagcgacgggcaggaggctggcaaaaaacgaccggaggcgcgcgagacggccgccagcagcaagcgcccgcagcatcgcgcccgcccgccctttcgctccctccgcctcaccgccatctccttctccgtcaccctcttgcctctctgtcagcctctcgccatggacccccagtactcgcagctccaggtccgtctccggccctgccagaccccatcccagcaaccagctgacctctcgtcccgcccgccaggccctctacgcaagcccgtcagcgaccgccttcagtccgctcctcgcgccggcgctcatggccccgctcgcgagcgtcacgctacccatcgcttttgcttcggccttctactttacgacgtttgtcgcgtctcccgtctctcgctcatgtcgtctcccggcgctgacgccctgccgctgctgtcgccgctgcccaggctcaagaagcaacctgtcaaggaggcgatcgccggcaccgtcgcgagcgtcgcggccggcctcggcgtcgtcgcgctcttcaacgccgtcggcgtctacgtttgaacgcgggtgtacgcccgaagagagggagaggagagagatacctgcgaggcctgctgatcgccatgatacccatcccggaccctcatggctggggccggttctcgcgaagacggaaggacgggccggatgggagaagaagctgaccgcgctgaccggccaagcgagccatcgtccgggagggggcaaggcagccatcctacaggccggtcgctcgccggccgacagctgggtccagcccgtgtcgctccgagccggccccttcctccgcgccgcccgccgcgccgctagcagtacggcgtcgtcaagtcgagctgaaccctacgctcaaagtcgagaacagggatgaatttacagcggtcggtccggtactcaccgcatcggaacctggccgagggcgatgctgttgacaggtagctcaatggaggcagaggaggagcgaggcgggggggggaaggtcagcggcagcgatcccgtccccttacctccctcgacgacggcctagtacagcacggacacaactgatcctcttgccattctcgctgccttcggggtcgacggtggtcgtcgacaggcaggaagggcggaacgacagggcaaggcggcaggagcaggtgggcggtaggggcagcagccacaaagacctgcggcccgacgcgtcgaacctcttccctcttgggtagccgaccgccatctgatcgaaagaccgtccattcttctagcgctggagtcgcgtcgtcgagagctatcgagcggtctcgggtttcgctgctgaaggatgactttgtgcttgcccgccgggaggccggcgccgcccaccctccctcggttgctttcagcctgaaccgcctgagcgagacccccggctaggcggcagttccagaattgggtgccgttttctgcatctaagaggcaaggtccgagctcagtccggcaagaccatgctgaacccggaaaagaggaaggagggaccccctctcccggacagtcgctatcggcgtgggaaccctcatagcacaccatatcccctttcggcccttcacccgcctatcgacgcgctgccgtatcgccgtctagcccaaccaccaccaccaccttccagcatcatcccagcgccatgacggttgccgttctgcccatgccgccgccgatcgtctctgcacctgccgcctcgaccctttcaacctcctccacctcaccggccgcccttctcctctcgttccacccgcaccatcggccgctcgcagtcatcatcggcgcgacccgactcgcctcgacccgggcgagccttttcctccaagccggccaggaggtcctcatcatcgacgacaggtccgacgccgcctcatccgtgccgatcgatcttcgggcgcgcgccgatagggccgagctcgcgctcgagcaccacccggagggctggcaggttgtcctcgataagcggcgggacgagatcggtctcgtctgcgtcgtcgattctggtcagtattcttcctctctgcaaagagctctctcgcagtgccgaactgcagccctattgcaggcggcggcctttgtcgactcgctcgaaggctgcgcgtactgaccgccaccgccgcccgcccgcacccttatctcgcctttcagtcgtcgacggctctttgacctcggtccggcggcctgcgtccgaccttcatgcgctgcgagcttactgctcgtcccaccgcctctcgctcaacgtctcggaccacccggccctctccgacttctccttcccctcgacccatcgcttcgcgctttcgtccaccccggccaccacacaaaccggccggcagagcgagcctgagctctcgtctctccaaattgccatctcgacaaacggcaaaggttgccggctcgcgagccggctcaagcgcgagattgtcggcaagctcccgcgcgcggttggccaggcggtcgagaatgtcgggctcctgcgcgagcgcgcaaaggccctctcagccgaggctgctgctgctgcttctgctgcagccgcttcttccgccaagagctcggccgacatgtttcctccgagtacggccgcattcgaggacgatccgtcgacgcctaacgccccgctcaactcgcccgtaccccagctgcaccggcgcccgtccgccggccgccggcagatgtcgtcctatttcacgtctgcgctcacgctttcggcctcgacttcggcaagcgccacgggcgggccgccgacgccaaccgacgagagcgccgcggctgaggacccggacgggcttgagcaggaggccctgcgtcggatgcgctgggtcgcccagatgagcgagtactggccgctcgacgcgctcggcgcacttaagccggccgatatggacggcctgcttggccgctacgacagccagaggactcgcggcggaggcgacgagggttttgtcgacggcgagtcgacgccgttggccggcgctgcctcctcatcttcatctggccagccggcaggcagctcgactgcggcggccgcgcgcagcggagcggccgccggtgccagctctgccccagacgacggacctgcgccgtctgcagcgcacgacctcgcccttcggccgccgtcgccaccgccggcgagcacgcgggggacgatccacttgatcgggtccggtccgggccacccttcgctcctgacgatcgccgcccaccaatcgctcctctctgcgacgcttgtcctctcggacaagctcgtcccggccgagatcctcgccctgatcccggcaactaccgaggtccacattgcgaaaaagtacccgggcaatgccgagggcgcccagaacgagatgatggagctcgccctcgttggtgccgagcggggcgagcgcgtcgtccggctcaagcagggagacccgtttgtctacggccggggtggcgaggaagtgctgttcttccgcgagcacggcttcgagtcgactgtcatcccgggcgtctcgtcggcgctcgccggcccgctcatgttcaacattcccgtcacccagcggggcgtcgccgagtcgatggtcctctgtaccggtgtcggccgcaagggtaaagctgtcacccttcctggcttcgagcgctcgcggacgctctgcctccttatgggcgtcgcccggctcagctccgtcatcgacgtcctgacccggccgtccgaaggcgccctcgacggcatcaccggccaccgcgcgggcccagcctatccgctccatacgccgattgccatcgtcgagcgcgcgtcgtcgcccgaccagcgcatgattgcctcgaccctcggcggcatcgtcgctgcgctcgagcgcgtcggcgagcagcgcgtgccgggcatgatggtcattggttttgcgtgcctcgcgcttgcgggcgaaggcgatgtcggcgtgcttgacgacgggccagaggcggacgagggaagggtcaatgcctggctcgcgcgcgagggcgacggcacgggtctcgtcgttcgcgagggcatgtcgccagagtgggactccctgatgaccggtcacggcgcgagtctatagctccctctccttcttctatcccctatatctagacaagatgatgtgaccttctcaggacagtctctcgtctaaggcggccctccccttcgcccctttgatcggagcttcagcccatacgcgcgcagcacgccacgccgagcctcctcgagcgaccgactgacagccctcccctttccgcgagggccctccgccttcgctgtcctactcgagcgaccttgcgacagtgtctcatcagaagacgagcccgtcgctctcttgagcgagctaaaagagcgaagggcggcaggagaggccagggtcgttcttccactcatcccctcatccccttatccctccatcaccccccacttcaacccttgctgtggttcgcaagtctccgtcatgacctcctcgtcgacacctcctgcgcctctgctcgcctcaatcttccagacgcccccgaaagccagcgagcctcaacgtcagttcctcagaacccccttcctggcccgttcggtcaagcagagccctaactgacgccttgcattgatcaccctttcttcacctgcagcagctgcctgccagacgccgaccaagttctcccggagcgtcgcgcaccaaaacctttggcgcatcctctcctccacctccgacgccgccgacagcgacgatgaacggtcaacgactacaacctgctcgcccgcccaccaaacgacgaagacgggccctgcctcttttggaccgccccgaatatcaacagcagcgggcggcctgactcggagtcctcgctcacacgaccttgtccgcttgctctggcccccttcgtcttcgtcggcggcagctcggtctcacacgcccccctgaaccgctgctcgatacccacccaacccttttgtacttggcaacgtacctacccatcccttttgtacttggcaacagataagcaagcaggagcgtgaagagaaggaggcggatcatgtggtatcgaaaggggaggcaaggacgctcagtacttgccgaggtcgatgtcctggacgccatccttgtcgacgagccggacgttgaggtcaccgaggtcgacgacgaggcctgccgagggagggtacaagagggcggtcagacgacggcgaggaaggagggagggccaggcagacgtacgcttccggacctcagccagacacatcttgagcacctcaatgccccgctcgcgatccatgttctcctcccagtgcgcgtccaggcaactcagcgcaaagaacgcgccatagccgtgtgccgcatagggcacgtcggcgagcgtgccaaggtagtcgatccagtaaagggcgggcgcggctgccgggacgtcgaagccggcgaggaggaggttgacagagtaggggtgccgcgagcggagcgaggttgcaagcgagcgccgaatccaggcggcggcggccggcggccggagctcggcgtgcgtcctgtgacagagtctgatcagtacttgtgtaaatgtgtctatcgtgcaagtccagaaggacgccaagacggaccgcatgtgctggagtcgaatgttgcgctcgacaaactcggcaaactggacagtgtcgcctgaggccggccgagtgtaacgcaaagatcagcaagaccggaggataagagggaaacgggaggggcggacgaacctggctcgccagagtaggccatgaggaggtgcggcgagagcgtcttgatcttgtcctcgtccgacttcatcttgacgacttgcagaggcggcagggaggacaagggacagagtcagcatgcagcagcagagcgaggccggggcggccagctacgagcccggcgatgatcgcgcaggcttgggcgtcgtcgaccagagaaggacgcactcgacctcgtcgccgtcgagtcggacgcgaggaggacgaagtccttgccggtgattccaaacgagcactctgcaggccatgcggaaagatcgggtgatggcggtcagcttactgaagctgcggtcaagctggaacggggcaggtaatgatgccgctcttgctcgagcttcgacggctcgagttcggagggcagggcgatggccgaggcgagcgacggacgacgcacccattcttcgtgtttcgtttccccgggaaagctagtctgcgtcagagagagagagcgagagaggttcgtgaagcggtgtgtgtgcttgtgggtcgaggtagggtcgaaggcaggtcgtctagaggtcgagggattgaggtaagagctcggaggcgagcgatggccgacgacgggcggcgtggaggcccagaagcccaggcagccccgaatcgggacttttggcccctttcgctgtcgtcccttgcccttatcgagccggctctcgctctcctgggacgagtacaagccatgctgagagcgttccgtcacaaacggaccgaaggctgtccttggacgtccgcccaggatacccgccaggaagcccacgacagagcctggaacccatctatcccgaatccaactagccttccgcgtttaagcagacggctgatcaagtactaccgtcggtagatgtgcgatagccacgtcagggaaaggtcacacttgatattcagggcggaattacgctcgaagcaaaggacagcgtcacaatcggctttgagcgaccgctggcggccggaggagtcgaatcgttttcgttgaacgaagatgcgacgagggtaggttgcgccgccattccgagtgctgagaccaggacgaggacagcgtagtgcgtccagtcagtatcacatgtgcagggtataggagcaaggggaagacagaccatgaaggcgtcgatattgtgtccggaccggctaaaacgacccgcaggcgaacgaccggccgccgaccgacctcgagctgattagacgctcgcttggagagatccagaggcgccatcgccacctcttctccacagagctagagctgggctagcccccactcacaggcggcaagacagccacgacgtcactctcgctgagctcgagccggccaacctcgtcctcgccgaccatcagctcgttgaccgcccaaccgctgcttgccagcaccctctcaagcgccggataaagcctgatgagctcgatcgcgagatcggcgagcgtcggggacaagaaggaggactgggaagagggcgagagcgcgagggcgagcgaggcgaggccgccggcggcgtcttgggcagaggcgaagaggaggaccgtgagcgagatggactggccgtcgggattcgacatggctgatgaccgcgagcgattcgacaggggacagaaggagcttgcggtgggctcgaggtgcacgtgtaagagtttggcttggaagagggtggacgtcgagaggcctcgggctgcgccgaaacggcggctgcgcctcgtcggccgtcgctccctccgaacgaccactccgaatcccaacagctggccgaccttgcatgcttgccgattcggccctgatagacggtcggccgctcgcgtcgtcttctcaccaggtgcacgagaggcgcgagattgacgcgcttgagctcaagccggccggccgacggaccccggcgagctcgtccggcgagctagcatcaagcggagcaggaagaggcaaggccgccctccgtcctcgtcccagcaggtcatcaaccgctccttctccttctgctcggcaagccgtcgagcgtactccagccataattccgtcctcggccttcgaccccctccttctgtctctcctcattccctcctcgctcttgggctgcctcgcccggctcggactcaccgctctcttcacgcacaaccggccggcagtccctccgcttgtgtggagccaggccgttggttgtctgctgatgggagtggcgctagggaagaaaggggaggttgagcgctgggggacggtcgggccggcggtctatgttggctggacaaccggtacgtactccctgccctactgctttggtggcttactcatgctcgctcttgccaccttcgtgtcaggcctctgcgggtccatcacgaccttctcgagctggatggtccagacatttgaggcatttagcgactttgacggccagcagcgtgcctcatgggtcgacaacgtccgtcccccccttccctgcgcttactcgcccgcaagcagctgatgccggccaggatcgtcgagtaggcaaccgacggcatcgctcagctcgtcttcaccctcgccgtctcgtgcttctcgctcgccctaggctgccgactcgccctctacctccctctcccctcctttcccagctgccaacctccccgcttcctcccactccttctcattgcctccagcctggccctctaccttgcctccatccttgcgctcgccctctcccggcaagattggccaggccacccagtgctcttcgcactcgtcctcgctccgcccggtacactcctccgcttctttctcggccgggccctcaaccccctctcgtcccggctcccgatctccggcacgctcctcgccaacctcctcgcgaccgccctcctttcaacgacgaccctccttacccacctcggcccgcggcgcaacgtagggcagtgccaggcgctaagggcggtcggcgacggcttttgcgggagcttgagcaccgtctcgacgttcgttgccgagcttgaggcgctgagtgcgcggggtcgcgtgggcgaccacgagcggcgaaggcctaaaagagcggacgaagaagcggaacacaagccgccgcccggcggtgacactaatggactcggctcgacaccccctccgctctgcgctccaagcccaacatacactcctcccccaccaccaccactaccaccaccacccactcccccaccggcccaaacagacttcaccgcacgcgaggcgcccctcctctacttgctcgcgagtatcgccttcggtcaagccctcaccgtgctgatccgcggcgtcgggggttgggtttcgcccgacgggagtggggggtgagcagggccgggtttgagatgagttctgaggtctttcgttcggtcgggctggaaggataaggcatgttcgtttgcaaaggtccgcaaacttccgcgagcgaggatcctgtgcgacaggatcagagcgtggggagccgtcgcttgccggccgagatgaaagggcaaggagccggttccgcaaagggttggaaaaaagcctcccctctcatgcatccttctccaaatacgcccgaaatttctcgagtcgctccttctcttcccgctcaagcgcaccctcgtcctgctcaagatcagcgccgccagcgcccgaccggcggaaatggagcttgccgtcgtgcagggcggcggaaatgcggcgctgggcgaagaagcggcctggtttcccgcgcggaggaaggcggtcttgcgtgcgcgcgcgggtcagagaaaggagggggaggggtcgtcagagggtgtcgccgacaggaggcgaagtcgaaagaaggagcgaggggtttgcccagcggtcggtcggtcggtcgggcgggtggggcgaggagcggcaacactcagaaggtcgaccaattgtactgcgcccgactgctctcagcgacgtcgtcctcgtcgggcccagtcgcatttgactcgtgcgagatcgacggcggcggctgctgctgctgctgctgctgatgctgttgctggtggtggtggtttggcggcgaagggtgctgaggcgagctgctgctcgcggacgagtcgggtgagccttgccggtgccggcggacgagcggcggctgggtgctgccgttgatgttggcgacagcgtcctcctggaccgaagaagcggtggacgcagccgacgagcctgcgatgctctcctgcctgctcctccctccccctcccccggcgccggccttcatccgcagctggctcctcgaccggacgaggactgcctggtggacgtttggatcaaagacggggccatcgcgccgcgcgtaggcgagcgggaactcgccgagcgggccgtccatccagggctcgtggggcgttgctgctggcgagcgagtggcgaagggcgaggggaggggtagagaggcgaggttcaggcgcgggagggcggcacctggcgcagcagcgccggctgtcgaggaggccgtcgttgaggaggtggaggttgaagaggacggcagggcagaggggagccggggcgaggtattggccgatgggaagagcgaggccgcggcgggtgagagcgaccgatggcgcgagcggctgcccccaccgccggtagcggggtcgggcgaatcgagcgcgcgcgagctgccaccggcagcggcgtcacagagctggatcgcgtcggcgagcgactgcagaggctgcatgagcgccccagcagcgtccttaccgccgccgccaccgaggtggagctcggcgctcgacgtcgtccgcaggggcgtcgtcgaccgggccgacgaccggcgcgaggcgatcgtcggtctcatgcaggccgggctcgagagcgatttcttgcagtcgaggcagacgcgcgaggtgacgacggcgacttggcgggtcggcgtcgtcgctgcgacagctgcagacggggcggcggcggtggtggttggggtgggcgtgccggagccgccggttgtgcctcccgcgtccgagaggggcggtgtcggaggcctcgacgacgcagacgacgtcgagccagaggggaggccgagcgcgccaaaatggcttgcgttggccttgtaggacgacgagggcgaggggttgcgcgactggaggggcgacgtcagggccgaggcgaacgtccgggggaagaggagcgggtgcgtctcggccgtgcaggacgagcagaagatgaggccgcatctgggcgcgcgcacacacgaacaagggcaaggggggccgggtcagcgtcggaggtcgtttaaagaggccgacagagggagcccggcccggagaaagggggtgagagactcacttgcggcagtggtgcttcctcgcggtgaacatgccaaagcggacgttgcagccgtcacggtcgcagacgtcggcgtcggcgtcggccttccagagtgcctttgggagcgccgcgtgcggctcctcgagcatgagcgagacggttgaaaagaactgggaggcgccgggccctgcggcggctgctcccgctgctgagggggccggcgtcggaggggcggtgagaggcaggccgagctcgaccgtgtgggtcgagaagcccgaggagccgggcgtcgttggctgatgctgctggtggtggccgttggcgagcgagttggcgggcgaggacgagcggatcgaggatgaggaggagacggtaggcgtcgacgagccgtcgcgccgcgcgggtacggcgcctgctgcggacggagggtggcggtggccgtccggcggcgagacggacgaggacgtcgacgggcatggcgaggctgcgagaaggatcgacaaggcgtgcgagagagcgagagatgggaggacgagggaaagtagggacgggggccgacgtggaagggcaggagaggaagacgggtaagccctcttttcgattggtgggctgaccaaacggccgacggcgggcgagccggtcgagccggcgagagaggagggaggacgagcgaggacgtcgctcgtttccctctctcgcaaggaaaaggaaaggaagaagacgcacctgtcctgtctggcctccgaccctgccggctcccagcagcagcagcagcctgcgaaagctcgcgccgtcgagcctctttcgagcccttctcgggctggacgcggcgtgggccggcccgctcggcctcggtctggttcgggtcggcgagcgtctgctgggggctcagggtcgccggcttggcgagcgtcaggagagccatggcctggatgtgtggtgttgggtgtagatgtgtaaagagatgcgatgcgagaggaggaggcggaagagagggctgggtcgggttgagggacggagggaggacgaggaggaggctgggctgagggctgcggccggggcggggcgaagcgtgcgtgtggtgcgcccgcccgcgcgatggctgcgcttcgcccgcccgcccgagagcctccgtccaagccagctagcccagggcgatcgagcattattcggccctttccttctttcacagaggcctccggtcgaacgacgactgcgctaaaggaaaggcggccagagtgaggccagcatgcatgcatccatgtatgcgccgtcgatagcgaggccagatgcgagagagaaggccaggccaggacaagcagggcggagggagagccagccaacgagatgcagagacgacgcgcgaacgagagcaggcggccgtctcccttccatcagccacgacgctagcttctctctctcttcctttctctctctcctctagcccatctcctcgcagcagcagcagcagcagcagcagcagcgcagcccatctcccggtcgaccggcccgcaaccctcgctcgcttcgctcgcctctctcccgcccgcccggccggatcgcagcagccgcatctgctcccttcctctccgcaccgccccgccctcggctcgtcctcctcctctccttgccgccgagccgcgcccaggcaactcgtcctcgtccgtcctcctcgctcgaatccagccttcgcgaccggacgtctccgtcaatacgccagcccgctcagcgccagcgccctcgccctcgtcgtcctccatctcgcctggccgcccgcccgcacgcgctctcgcccagcatgacggccgcctcgcccatcacctcggtcgcgcctccctcgtcttcctcgcccatcacctcggtcgccccccagcagtactcctaccagccccaacagcagcagcagcagggcgcgctcctcgcccgactccacctcgacgtccggtccgagcgcttcgtcgtcgaccgcgagcggctcatgagcctgcccgagtcggtcctgctctgcctctttccgaacgggctcgtcctctcgcgcccggccgggatgggcgtcgacgactcggagggcgaggacgtctacggcgttgatgtcagtctcggcctgtcctcttgactgcctttcgctcgctcgctcgcaggctaggaagctgacgtcgagctccgccttccctctccgctcctttcctccccccgcagttcgacccccgagcgttccgcttcgtcctcgacttctggcagaaagcaaccgacgacttctacggcacgccctcggcgccaggcgggctcctcgcggcccagcacgccctcgtccagtccggcgcatggggcggcgacgacgctggcgcgggcgtgggcgggccggccaacccgctcctgctcaagcagggcgtcatcgtcctccgcgaggagctcgagtatttcgtcatccctcccgccggcgggcgagcaaagacggacggcgagggcgaggcgaatggcgcgctcctccggttgaagcgcttggcgggcaaagggctccttggcaagcgccagatctttacggccctccagcgcaacgtcaacaaggagaataatgtcgccgagcagcatctgattgacatgctctgcatgtcgtgcgtccccctcccgcctctctctctttgccctcctctggaggcttcgacgcgaagctgacctctccgacctccccccccccgccccttgtcggcagcggcttcgaccgcgacgacacctggggccaccgcgacctcgagcccggccggtgctccatctcctccatcgcgcttgtcctactcaaaaccggcatcgtccaccacggcccttcctccgcctcggcggcggcgaaacgtgccggcggaagaggagcgggaggagggcagggagacgtcacgctcgacggggcccagatggtcactgcccagaagctgctgctgttttggcgcaagccggcgagaaagtgctggtgggacggggtcgagctcgatgtggcggtcgacgtcgacgacgacgagggcaaggctgcaggagctggggagacggtcaaggtctgggcgaggcgcgtctggacgctcgagctcaacatcgtacgttcctccttccttcgcgcatgcgaggcctcgactcgcgctctgggctgacttgtcgctcgctccttccttactccaaacctagatctgagccgaactctctccgtggccctttcgccttcgctcgctcgctcgacgatcgtggccacttctcgtcgattcggtcagttcctacgcggcggccctgctcgagcagccttcgaccatcaccgtcgtctcgaagccgggagcccctcgaccgacggcccggcgtcagtaaaccggaccgccgcgcgacgtccgtctcggccgtctcacccccctcccctcccctgtcccctcagaggcctcgcctctcgttcgcgtcacttttgtatcctcctcgccctctggcgtgtagacctcccccgccgttcatgaccctcctcctcctgaccgtcctctgtggccccgtttggctgccctcccctgtccgtttcgatacccctcccccctctcctgccggggcgagctcgcctcccgatgccttcatgcttccttacgatcactcctactcttccgtccgcacaaccagagcaaagacagaggggctggcctagctgcgagcgggtgtcgaagaggtggggttcgtccgcgcgtgcgcgcacgcttgtacgcggagggagagcttcagcccctttttacattccgagcccttcagccggtcgctcgctcgctcgcctgccttcagccaacatccccccccccctctctgccagccactccggccgggaaaccccgcgctcgcagatgccgagctccttccggagggctccgccactcgctctaagcccgacgccgctgcccggcgaaccatcacacgctggctcgctctcgcagacggccctcagccctcctcgtctcttcggctgccttgagctctcctcttctagcctagatacccgtccgtcctcgtctgtcgcctcgagcgcttcccccccggcgcaccagtagcagcgacagctcgcccgcggccagccgacctcaggcaatgtcgtcctccgcccggcgccattccctcccgacctcctccctcttcgacctcagctccaaaagtagcaacggcaacggccacgcctcgaccccgagttcttccgcacgccgagctccgaccgctcctgacggcgccggcggagggccgctctacctcgggctcgagctcgcgctcgatcgggtccaggcggtcgtgctcgacagcgagctcggagtcgtccattcgatcgaggttgagcttgactcgcttgcggctagcagcttgccgtacgtcccatcatctctttcgagctcgagctgcgcggtcggacctgacgacaacgacgacgactaacggctcgcgctgtcgcccgcagcaggacggtcaacggcgtccatcacggcccagacgggagcgcgacccagccgctcgagctcgtccttggcgcgctcgacggcgtcctcgagcggcttagcatggcatgcgacctcggccgggtcgcttccgttggcggctgcgctcatgtccgtccccttttttccgctccctcacacgccgcagtcggctgacgtgcgccgcctgtcgtcctcaccctagagcgcccttgtcctcctcacgcccgactttgcacctcaactcgcgtcgatcccggtctcttcggccctccaggcgcactttgctgactcgtcagcctttgtcagccgtgcgctcgtaacctcgctcgatacgacgacggtcggccagcgatctgtcctcgtgaaagcagcagcgtcggcgggcgcacaggcgtttatgaccccgctgctgcttcggtcaggcgccgttcagctcctccgcctgccttggaagaaggccgagcgcatcgtcgcactcgcaggactcgtcgagagcgtcctcgtcggctccccggtcggatgggagacgagcaccgcggtcgacgtcagcgggctgtgggacgtccaggcgcatgagtggagcacgagcgggacagacctcgtcgctggtgggcctagggcaggggagggcctccggcatcggctcggctcgggacggcggcgggtcggggaggactcgagccggtcggtcagcgtctatctccaggagcgcttcggcttttcgccgggctgcaaagtcacgccgtgtacgtctgaccatcgcccacttctccctattctcgcagacgatgttgaccaccctctcgaccgcgcgcagtcatcctgcagagtctcgccacttacctctcgctctgtccggcaagcggcgacatcgccctctcgtttgaccagctcgatatcctctcgttccccctcccagccgttccgactccttcggcgctttaccagacgctccctcatccggcgcagcggctagaggaggcaccgcgcttcatcggccagctttcaaactgcaacggccacgctgcgcgcactcaggtgcgaccgcccgctttcttcgtgtttcttgcggccggcttctgactgctcgcgacgacctcggccgagacagatcatggcctcgtacgccaatgcgagctggcgcgtcttcggccagatggtcagcccgatcgtcccgcccggcggaagcctcggctttgacgacaagctctacaccttcttctggtgcgtcgcctcctgctcgcgctagagcactcaaacgatctgacatgctcggtttcgcaggccccggagcgaagtgcatccgtttggtattgctgaggggcaccaccgcttcgaggatggcacggcgacgaccgaattccgcgacctccgtgccaacccacggtacgtaaacagctctcagccctccctgccctcgcaccgcgcattgacattcgagtttcgcgtcgcgcagctgcctcatcgaatcgcagctgctttctctccgcgcacgctactcgaccatcctgagcgccgaggcgccgggccggtcaacactcggcccgccgccacgtacggccctcagcctcggcttcgaccctttcgacgagtcgacgacgccgctgcgcgtcctcgttgccgagagtccgatgcaggtctggtgcgtccctttcgtcctcgagaggagtctcgccgatgacgaacttggcccgtcccgtctcacagccagccgataatgggcgtcctcgcggacgtctttggcgctcccgtctcgggcggccatcggcactcctctcgcgaggcagaaggtaacgcgtgtgcgacgacaactccttctgccgcatccgtcggctgcgcctactttggtacgtgccgttgactttgacttctccagcgatcgcctgttctaaccgcgctttgccactgaatcggcagcctgctgggcggacatgtcgccaccgaaccaaaccttcgaggcctttgtcctgtcgatcctcaacgcgcgctcgtcgtcgacatctcggccgaccctccgctcccgtccctcgcgttcatcgctctcaaacggctcggccgtcacccttgcggcgatcctcgagtcgaccggctctggcgacgacgacccgcgagcgacaccgccgcatcggccgcttcaccggtccaagtcggcccaccacctctccctgcgccagaacggggccgtcggcgccgcttgcggacggcactcggcagcgacgctgacgcccctggcggtcgcagaccgggacgccttccgggcgtacggctcgatgctgccagagttcctccgcctcgaggagctctttgtcaagggtctagtccacccgccggccgcctagacgccatcacgcttattctcttgcttgtcctttggtccatgcgcctgccttccattcctgtcgctcttgaacgccttctctgccgtcttgtagattggtccgccgctgcgctttacatagatgtcatcccgtcggtcgagactcttgctccgccccgccgataccgctcgacgcgccatctgtaagcttgccgatccaccagcgctggaggccgcgagtctctgtcgacccggactcaacgccgaccttcgggcgggcgtagtcgaagcgggcaaggattgaccggccgacaaagaggtgcggaaggtagagcaacgcgtcgtcgtgcatggccgctgtcggaagaggcggcagagcaggcaaagaacctgagacgacatattcaactgcgacagctgggagctgagcaaggaaccaagccggcaggcccatctcctctgacctggtgatgccagggacgcgcgagcaacgcgtcagcgacgccgcagcacttgcagaaacgcagacgatgcagcaactcgacgtacgctgcgatctcgccctcccacgtcgcgcaactgaagagccatatgtcgatgctgacatctgcgttgacctcacctgggccgaagacgacgcggccgcggtagcggaggtcggttgctcgaatgccggcctcctcttcgagctcgcgcagcgcggcatcggcgaccgactcgtccgagagctcgaccttgccgccgaagccgttccatctgggcggtcaagcggagagggatcagtacagtggaccgagggcgactgctgagctgagtatgatggccgaacatgccggtgaaagcaccgcgctgcttgaggccgagcaggacctgcacacggggtcgagctcgaaaggctcagcatgcagaccggcgaggccagcgatagcttggtctttacgcactctcggctcagcatccactgctccaggctcgggaaggacatagatgagcgtgtagaccttgaaggcacggatcgctaaccaggccggctcggctagccctggggccgacgagctggcgagggtcgagtcggccggcgcatcggtgaacgggaagggcggctccgatggcgaggacatggcctgctgcggcggctgccgctgctgcgagcgtgtcaagcagggtatgcctcaaggcgggtcagcgatggtagacgttaacgagaacaaaggtcgaccggcggcggcgacacggccaaaaggggtcaccaccgggtcaaaaagatttggaggtactgggaatcgaacccaggctaatcactgatcggatgttgaatgcgaagcaattgtcgtaaccacttgactatacccccttcacgtgttgactggttgataagaatcaataatatttagatgatataaagcaatggtttacacccgcttctcgaccgtcgcgtatggccgtgagtacgttactatctccttttcagaagtgcaagcagtattgtaaatgtgagagagacggcgaaagggctcaggcgggcaaagctaagctcgcttttccgattcgaacccgttctcaacgcaattgccgactgtcgtcttcgccgcctccttctgtcggcgaagcatccgccggaccaaccaccaccttcctcaaggagaagacagcagagagaccagcgatggcgagtagacgacgaccagctggcatcggtctctctgtgtacacagctgacgtccacctcctccctctcgcgcccactagctcggccacctgctcttactttcaccttttaagaatgcaaacaacatcccatctcgtcttgaaaagctgatcagcgagctcgaacggccgacgacttgagccctttcgcgtcagtcggaacaagggtttataaatcattgtccgtagctgtcttgtgctgagggtgggcaacctctctcgccaagaggcggttcggggagggcgcgaagggacatttgacgggagcgagccgcctgactataggccctttccgatctggcgctcgcctatacttgtctccactcgggcgtgtcggggctttgattggggacgcgactgttagaaccttgacatgaacgttgagttgccctaatcccccttgtctgcttgagctgcctgagtggccggggccgcttggctgccggctgccggtgcttgtcctcctcccgagctatcaacaccgaccaccctcgtcgacctcgcctactatttcgccccacctagccatatgggaccatcttctctagcccgcagccgccaagtgagattgcatgcagatgacgcacccatcaataagcatccaaccttacgttggcggcggcgtcgcgcgcgccgcccgacgcgccgcgtcggcaaagccgcctccgcctgacagccgaggcctggcccgcgagatgcccttgagccggctggaaggcgacggaggagagagcttgtcagtggaccagtgcaggcgcagatgcggcggtagactgacggtggtgggcgggctgcgagcctcgcgcgagtttttgcgagccaatgtccgtacgcgtgatctacaaggcaagaggaatcagcgctcgttgaaaatgaagaacgagagggcgactcacgcagcactcgtgtccgctcgacctttgccgctcgattgcgctcgcgagcctttggcagctcagcccggagcctggcgatcgctgccctctttcgccgaaccttgtcgaagtggagggcgatagcgagtgacgctcggctctcccacgcaaagagcgcccggtcgaggaggttgcgttggcggagggcgacgacctcggcctcctaagagggcgcacacagagggcgggtcagaaatctttgacagcttctctctcgctgcttacagcgacgtacgatgtcgtagaggcgggcctccttaagcttgtcgctccaggcccggaaggttgcgcgcaggaggtcgatccgctcacgctcatgccgcgcacggtcagcggccttgcgctcgagcgacttgcgcttgcggttgacccagcggtgcagcatcttgcggaccaggcctgacagaaacaggcggggcgagagtcagcactgagtcaggtctgggcaggtcgaagccacagaaaacgacggactttcgagatggacatcccggaagctctgcatgagcgagagctgctcgccgtgcttaacgcattcggcagtccagcggacaaaggcgcgggccttgatcgtccgctcgtgcttgacaatggcaacctggcgtgctgcctccagcgtcccaagacgagacctccaatgagagacgaacgtgaagaggaagtgctgaggatgtcggacgcaggtgagtcggcgcacagtcggcctaacgtcgagttgagggctcgcacctgctccgacttgactcgtacggcagcctcggtctgctgcagctgcttggcccgattcaggcgtgccctccattctgcagattcgagacgacgctgatcagctcagctcagccttcattcgataggagacaatgaaagacttaccgccaaaccactctcgagcgaccgcccggtcggcaacttgaatagcgacctcggtgagcgcctgtgacgagaaggtttagggacgtcagttccttgcgcaggcggccttctttccctggtcacaacgcactgctttgcgctcgagtcccttcttcagaacgctgacaccgagtttcagcagcgccttccgacgcagatccttggcgagcgaggattgggcgctgatgaagaccaaggttgactgcgggtcagcatctggttatagggcaacgggtagcgggggcgaagatgtacgctgctgcttgccatcggccgagggacgcctggagcaaccgccgtccaacggcgagagagacgatgccttcggcctcccggcgtctcgtcttgctgcaccatgctgagaaggccgcctggagaatgttctctcgcgactctgctttccagacctcgagccttgccctcagttgagcctgcgatgccttccgcgtgacccagcgctggaagctactccggaggagctccatggcgcgatgatcgtccgctactctgccgagctgggcgtcgcgccagcgaccaaagatctcgcgcttgagacgctcggcctgccggccgcgcacgagcttctcgcgcttggcgagcgagtactgccagcgggccttccgccggtcatcccactttgtccgccagcgcagccacgtcttgccgacggtagctcgacgttcgccctcgacgatgcgggcccaggcgtcttgtcgcgcccgatgggcgtcgatccaggtggcgacgctctcggtcatcagcgaccgcgcggcgagctgggacgccagcagcgctagagactggtgcttgagcatgaccttgcgccagtgagagagcgtcgaaccaaggagaaggaaggcccgggcctggtcgatctgagctgccgttgtctggattgggcaggcgggccgtcagtgtcggcagaaaggggcgccttcagctgtgccagtggacgtaccgtcacccattcgcgccccttgcgccaaacgtcccagcaccgacccatgagcccgatattgtaaaagacatcggcccggcgctcatcctcacgttggcgagcgcgttcctcgtcctcgcgccgaagctcctcctcgatagccgcacgtgactgcgagatgcgcttcggcaacggctgcagactcggcagcggcggcggtggatggggcggcggcggcggcgaagtcgccagcatacgagcttgctcatgacccaggcggtgcggtgtcggctcgtacagccgaggatgcggatgaacgacggatgaaggccgggctggaggccgtcgacgggcgagcggcgtgctcgtccggagcggcgggctgaggctccgtgtgctgaatgggccggcttgcgagccgccaagcccgtagccgacagccgactgggatgcctgctcctcttcatcgtcatactcggtgccagacgtgctctcggcgaggagttggcgagcgtcaagcactggcgaggaccgagcggacgacgaggtcgaggcgagctcgcgtgagtccgagagccagcgcgcccagcgctcgccccagttgccgcctgggactgagccgagcttgaggatgaagcggtagtagctgcaggtcatctgctggtcagtcagagtgtcggcgaggcctagagtgtgagcggtttcggacgcacacaacatcgtcggccgggtcgagaccgcaggcctggaggacgtcgttgtaggccttgaagacctcgataaaggacgtcgaggctggcccggctgcacggatgatgctcgcgacgagattgaggtcgagctcggccgctggtgggacacccatctaacgcagggcggcggcgtgagcagcgagaggcgatggtggtcagggaggaagcgacgcgcagggaagcgcagccaacaagacgcgtcccctggcgagggagagcaaagacatcatgcgagataaacggtagataatcacagcgtatatcaattccttaattgtctaacggctatgatattcgcctctcacgcgaagggcccgggttcgactcccggttagggattacctttttgccactcatgacatgcttatttccctccttccttcgctctcgctcggagtcgattgtcccgaccccgcctggtagagctcacttgctgccaggcctcccgtctagtctacgctcgtccatgtcacccctccctcgcactgcggccttccttcttgagcgctctctattttttgaaggtatcatgaatcgcgtgcgattaagggccggagctagaggcgggtccgagagagtgagagggctaccgtgcgaggtcgcccgcccgtcagagcttgagttcggccaagatgcgcttggcgagcatctggtactgccatgcgttgccgccgactcgccggaactgaacgccgtgaaggggcagccagggcacctgagcgtaagagcagccaggtcagtccaagagttcgctcgtcgagctggggaggtagatttgacgcaccttgatcaccatgatctcgaagcggacgaccatctcgctcatgccgccgccgttgacaccagacgacacgccaccggccgcgctgcctcgccgacccatcgtcgttgtcgtccgagtgggtgacgtgcaccaaacgtccgcctcgtcgtccgtcgccgagtcgtgctgatccgccgctgccgccgccgccggcatgcgacggccggagggcgagactggcggcgagagcgggagcgacgacggcgacgacgggcgaccgagggacagagctgacggcgagtcggaagcgtctgcatgagccggaggcgaggtctgttgatggcgagacgtgtcagcgatggacggcagcgatcggtagcaagcacagaagaggatgcgcacctcgtccgccttctccttcttgcccaggctgatgctcagcttcgagcttttgcgcttgatgctcggccgcttctcgaggccggtaccgggcacgatcgacgccaggtcgatcgacggcgagtggacgcactcgaagccgccacgcagcggccggtactggacgccgagggtgccgaggacgcgctggatatcggacgacagggctgaggcagaccgggtcgaggtcgttgcgacgctgcaaggatggcggggaagttagcccatgcgctggcgacagttctcaccgtgtcaggacgcacgagaagagacccttgaggtagattggcttgaactcttccttggtgctctcgacgtcgagccggcttgcgtcgggcgtccgatggctgttgcgctgggcagagacttcggcgctctcctcctggacgccgagggcctggccggtggccgccgacgtcgcccagtcggctggctcgccaaggacggtcgatggccgctgctgagggccctggcccgatgcacggcgtgagccggcagtgacggtggccgagcgaccgaccgcaactccgccgacggatgtccttcgggcgtgtgccaccgccgggtctggtccgagggtggacgtagcgcgctggtgcgcgattggggaacccgacagcggcgccgattgcgacagaggctcggctgctgccgagccgaccgggtcgggcagagccgcggacaggtccctggccgcgctatcgagcccattggacgtcccgcgcgagaaggaacgcgggagcgtcatgctctggcgcttggccgaccgcttggcctgctcctctggagagcgcgcaagcatcgacccaaagcgcttggcgaggctcgagccgtgggctgggctctcgggcgagggcgcagaaggtacagggaccgacgccgggagcggcgtcgccatggcggccacaggcgatgcctcgctcagggccgcctcgtcatcctctgcggttggcggaagggtcgactggctgaagacgtcggcgttggccgtcggccggtcgatctggacagacagcggccgagcctgaggggcgggcgcggcggaggggtcgtagaagaaggacgagtggacgctcgactccttgggcacctcggccagcgttcgcggtgaagccatcgggttggcctgcgagagcgactgacttcgccggtgggtggccgcacttggcgcccgaggcagattcggcgttgttggcgtcggcgggccgccggctgagggcggaaggacgagcctcgtggtcgcctcgtctgcactcggatgctgcatgacaaccgcagggtcgccaagtccgggctcgtccaggccagcgcgtgttcgcggagctgggccgacgcgcgcgccgaggtcaaccgtcggcatgcgtgacgaggccgacggcaaggacgaggccggcgcaggcagtcgcggcagggccatcgagtaatcggggccgagtgccgggcgagcggctgcactcttgggcgctcgacaccccccgcgaccgcaccctcttccgcatgtcctccttctgccgcgacctcgaggcctccaccatctccgctgccttcgtccactccatcctgcctcacttccctcccgaattccctctaccgacctttgacgctatcaaccacatgtacccacttcccgagcccgacctttcgtaattctcgccgcgcgccgccgagacgtttcctcgctgcccgcaaggacctatgtctatgacctcgacctcgacctaccctcaactgccgaccgcaacagctcttcttctccttttctccctacaggatcagactatcatgtcttctaacccccggcaacttgtggtcttcgactttgattggtttttccagctttcctcgcgtctgtacggtctctcagtgctgacttaaccccccccgcgccccttgccgcctcgcaggtcgttcgtcgaccaggacaccgaccgctacgtgctcgagtaccactttacaccgctccggcgcaagctcgaaacgctcaagaactcgggcatgcagtacaccgacgccgtgtgagtcgcggtcgaggccgccggtgctcgaacagggcctgactccttcttgcggcaactgccgccgctagcgctgcgaccgtcgccgagctccaggagacgcgcaacatcaccaaggcccagattaccgaggccctgcaggacctgcccgtcgtgagtcgagagccgcccttcatccgactgcgtttggcgctgactatcgctgcctgtcgcgcgccgcctcgccagcacccggccatgctgcgtgccgttcacggcctcaaggccgccgacagcccgtcgacgagcttcttcctcctctccaactccaacacggtctacatcgacaccatcctgaaggttcgcatttgtcgcgcgatgagtcagagaggcgtccaaggctaacgcacctctttcctgccgccgtcgcctcgcagcaccgcaagctcaccgacttctttgccaggattacgactaacccatcggcctgggatgagaacgagaagctcatcatcaggcgccgtgtcgacccttcgggcccgcagcacacgtgcaaggtcggctgctcggccaacatgtgcaagggtgcgtcgtcgctgctgttgctccggtgacctgccccttcgcgtgctgacctcaagctgcgcttgcgtaggcgacgagctcgacgcctacattaaggaaaacggaccctttgaccgcgtctgctacgtcggcgacggcggcaacgacttctgcccgatcctccgcctgcgcgagtgcgtcaccctcccccccctgatgacactgcgcaccgaggctcgcccgtctgacttctcatcttctcgcgcgccctaggaacgacattgcctttgtccgaaccgacaaggagctcgaggtccgcgtccgcgaggagggcgccaaggagggtctccgctgccaggtcaagtactggggcatgggctgggagatcgaggagtactttggcgagggcggcgtcgcgcgccagctctagaccaggagaaaaggttccggaaccgaggcaaggtcgagcggccgggctatagatgtgttgtagacctggagagcgtcaagccctccgtcgagagcgctcggtgtgctgcgcgatcggctcgctactgccttcgttggctaccaggcatcggcagtgaagtcgagaacgacgaccgactcaatcagaggtccaacgagagcctatccagcgatggtgtcagcaaggcgtctcgacaatccatcccggacgcaggacgcaccttgaaagcagcgtgcgccgggcaacagtcgaggtagaattggcggtcggcgtcgttctgaagcaaagtcggccgtcaggcaactgtgccggttaggtctcgcactcacagagagctcacctcaaactcgaccaggtaaacgtgctccatcgcccggtgctggccctcggggctgtcctgccggccgccttgaagcctgacgatgtatgacccgccgctggcgccggtcggccgcttgcactcgtctttcagggcgaggaaagcgcgtgcaacctcggtgatgcgctcggtcggtgtgccagccttgtactggaaggcgacgacgtgctggatcggcatcttctgaggaaacggacgggagcgagagtgaccgttcgaggagggcccgtcgtccactgcatctcggccggctcgtgtgctcctcctgttgccctgcaacgacgaccctccctgaccttccagcctcctcccttcatcaactatccccgcccttcttgccacctttcaaaacactacagaacatggcggacgctcgggttaggcgcgtgtccaaagagattcgaggtgcggccctggcttgaccttcggccctgccctccgccggctgagcttgcgagccacgggcagatgcttgggcaggcttctcgagccgatcagccatcgcgttgagcctcgcagctgaccccgttcctgttgcagactgccagaaggacaagacgtcgcagatcaccatcgagagtacgtggccgacctgtcacgagtcgggccgggcgaggtagcatccgaccgagctgaccatcgcttcctcgtgctccctccgaaccttcagtgatcggtgcggcttaaatcagcgagctcactcatggagtcgccttgcttacagctcccgccttgaactctgtcagacgagtcgcccttccacctgcttgggacgtttaagggtcctgtcagtcggcgtgctcgagccactcggctgtgctgcgacgcggcccgcagctgcccatcatcgcctgatcctcttgccctttcgcgtcgttacattcgcagatcgacacgccgtacgagggaggccactacgaggtcgacatcgtcgttccggaaggcgttcgtccatgcgagagctctgatcgtctcacgggagccggttgttgaccccttcgacctgcgtgcgctgcgcccgaccgacgactgtggctcgagatagtacccgttcagcccgatcaagatgaagttcatcaccaaggtctaccgtgcgttactcatgcttgcgcttggtctcgcgtggaaggcgctgaccgatgctggacgcccttgtcatccagacccgaacgtctcgtcgcaatccgtcggtgctcgttcgctctggctcggctaaacggagacgactgaccctgcttctctgaccgttgacattgccctcttcagggagctatctgtgagtcttcctctctgaaaattctgagccgctctcattcgctgacgctggctatgctcaggcctcgacatcctcaagggtgaggctgtgccgactcctcgctgagccaacccccttttaggctgacccactgccctcgcctcactagacgcctggagtccggtcctcactattaagtcgactctaatcagcttgcagagcttgttgtgctcgccagagccgaacgacccgcaggatgccgaaggagcgtcgctctcgtcctcttaacttgccttgccaccggctgacacaattgcaatccctcagtcgcaaaacactacctgacgtctaagtgcgttgctcaataccgcttcgaatgtgtgctaccttgtgtctgaccgctctggcttctcctcgcgcgcagagagagcttcaacgagacggcccgcttctgggcgacgacgtacgccggtgcctcggccgccaaggcagacgcctcgtccaacggcaaggacccggtcgcgctcgccgggcttgacaggggcgaggtcgacaagtttacaaacgtgcgtcgtcgtcgctgtccatctcggcagctcagcgctgaccgttgcccgtatccgactgcctttctggtgacagatgggcttcgaacaggcgaaagtcgtacgtctctgcggccagcaaaccgccttgttgatcgcgtctgacatggtcgtactgctcccgccagatcgccaccctcaaggcgctgaattaccgcggcaataacgtcaagaacatcagcgacaatgccgtgctcgaggagctgctcaagtgatgaccatgcgcccgttactcgatgatttcgcgctcgctctcctctcgcgacaacttccgtccgggagatgaccgcaggcgggcccgtcgtttttcccgccgccggcccggccctggcccgtcggacccagccagccccttttgatcgtccaaggcgaccagcgcgtttcagaacctggtctcgctcgcgcgcgcgtagctcacccgcccgcccaaccagcgacgttacgcccttgggctgacctgatcctcctcagcaggctgcgtcgcgcctccccattcctttagatccgagccagtcatcgctctggcggacgcagattccgaccccgtcctgccaaactgacggtcgcctgctggcttatctgtccgagaaggccgcccttgcgtgaccgcgatcgccggccaagccccgcaatttgaggcgagcccctgccccaacaacgccttctgacccaacgcccacctataccgtgagctcccgttcgctcgcaggacccaccgagtcgtgcgtccgtcccagagctctgtacgagtcacgtttgtcggcccgtcgagcgggagaagcttgtgccgggagagaccgggattgggcgggcgccttcctcccccagtcagccgcttgtgcgagcatcttaaagtcgaccgttgcctccggcagctcacccagtcactcatcccacctctcctaaccctccgcttcttgaagatgaccattcgtcgcatcgcaaaagctctcgaggtgcccggcgagcacgacctctatgtgcgtccatcggttcggcaaccggctgtcgacctcaccgaaagccgagcactgaccttgttgatcatcgccagtccaacgtcgacattctaccgctgctgtcgtcgaggcgcacctggaacaagacgacctttgtctggttctggttatcgactagtaagagagacactcaatcggcagcgtcaagtaacatggctgaccacctcgcccggctgcgctcaaggcatcaacattggcggtctgaccggctcagcctctgtcctctcgctcggccttactgtctggcaggcgacgctctgcgatgtcatcggctcgatgatcatttgcttcgccctcgtcgccaacggccgtccgggcgggcgctggggcgtgccctttgcggtcgccaaccgatccgcgtggggcctcaggggcgcctggttcgtcgtgttgaaccgtctcatcctctctgtatgtcgcgcctttcaatccatctccatcgcgtcattcccagagctgacaagtcgccgacgttgccttgcgcagttctgctggtttgtgcgttgccgtcgggctcctccggccgtgccgaccgctttgccgtgctgacgacggctccttctgtcgctgcagggcgtccaaagctggtggggaggccaggtctgcgtcaacttgattggcgcgatggcgcctagcttctacaccatgcgcaaccatttcccggccagcgcacacatgacgacggccgatttcagtcagtagagcaccttcatctttctaaactgcagacctcactcgctcacctcgcgcatccctcgacgcccttcctttcagtcggcttcctcgtcttctggaccctctcgctcccgattctcgcgatcaagcccgaacggtaccgcattccggcagtcgtctcttctatcggcgtcaccgtcggcgtcatcgccctcttgtgctggtcgctcgccaagcagggtgacgcagggcctctgatgtacgagacgtcggtgactctcggcaaggcccggctccaaggcagcgcgcttgcctgggccatgactcgctccgtgacgacgacgatcggcggttgggccgggtacgtcgctcaaaacctcctgcactctggcgcttgctgacgccctcccccctggccttctctacccagtgccatcttgtaccagtcgggtcggtcgtcgtccctgccactgcagctgctgtcgatcaatttgctgacaagactcgtgtcgctcttccctcactagacttctcgcgctacgctcgccgcgagggcgaccagattctcggccagatctttgtcatcccggcctgcctcattctttcgagcgtcatcggcctcgtcatcacgagctgtgcggccggcatctacccttacgaggagtttggcctcctttggcggccttacaagctcatgcaggtcgttcaagagcaggaggcaacagctggcgctcgggccgccatcttcttcctctccctctcgttcctcacctctcagttctgcgtcaacgtaaggctctgccttcacatcttgcagagactgaggacccaggctgacctgtcgacccctgtagaccgccgggtgtgcggtcgtcggcggcattgacctcatgtgcctcctcccgaagtgggtcgacagcaagcgggtgcgtcccttacttccttggccgccaaagctggttccaggactgacgtcggctgcttaaacgatgatgacactggcagggcccgtacattgtggccgtcgtgggcttcgccctgtgcccgtggaatctagtcaacaacggtgagctctgtttgcttgccttcctgtgctcgtcgctgaccatcttctctaaccgtctggcagctgcgacgttcataagcgtcctctcatcctacagtatcttccttggtccacttgccggcagtacgttctcagactccttcccgtcctggcacgcggtctgaacttcaccgctcttccgcccatccccagtcatgatcgcagactacgccttcgtccggtcttcgcgcctcaagctctctcacctctacattccgaacgacagctcagactactggttctggcacggcaagtctccttcgcgctcctcgtccgcgcttcttgccgctcaccctcgctcgcttcttctccaggcttgaacctccgtgctccagtcatctgggcgctggccgtcttcccttccttcccgggcttcatctcgacgatcagcaagggtaggattgccgttcctctcggctgggttcacacgtcgtacctcgcatggattctcggtgcgtctcgcccagtcgcgcatagcacgcacaagctcactgacctacttggaccgctgcccgcttcaggcttcacaatcagctccaccctctgggtcgcttccaacaagatctggcctccgcccggcgtcggcgagattgacgaaggcttcgacctcagcctccgacacgagccggccccgacgaccgagggggagcccagcgaatcgggcgaggagaagaaggttgacgacggcccgcctgttgccctcgcttactaaaccgactggaacgacagagccagacccctgcctctttaccctagaccttgtagatacgcttcgctccctgtacatgccgctccccattgcctcttgctcaattgcacactagtatgatacgcgatcatctgcattgcaccgccctctcgtccagcggcgcagcctgagcgactcgccccagacggtccatctcgatgaaggagacgccctcgcgcctgtcttccctcaatgcgcgactcgtccactcgaccttgacacgtacggtctcgccttcggggctgaacatgcgcgcaaaagtcgagcgcatctcggcgacgatcgcctcgggcgtaccgacgacgtcgacgccgcgatgtgtcggtttgccgacgcaaggcccggtgcgaacctggacgagttcaaaggcgagaccgtcctgcgagagcttgcctgcgatgcagggctggtcggcgagcgctggccacatctatcgggtcccaggagtgcatgtacagtcagcctcggtgccttatcgcagatcgctcgccgctggagaggactcacgcagcagggcacaccactgatgagcgcctctgaggtgctgttgcttccgccgtgcgtcaggaaccagcctgtcgcccgatggacgagcacggcggcttgaggagcaaagcggctgaagcagccgaggccgctggcctcgaccgagcgaacgagatcctcgggcaagacagcgaagggcgaggccagggcaaagacgaaggggatctggagctccatcagcgagttgacgaggtggacgatcagatccggtcgaagagagggaaagaagagcctgtgagaagtcgtcagtcctcgctccctcccggccacaggagcagcacgaccgacttacgagccaaagctgatgtagagcgctttccgctcgcccttggtctcgagtatgcggtcgagaaacttgacgactgggtcgtcggcgtcgacggccgagattgacggcgtctcggaccaaaggctttcaggcccctgcgggccgatggcgaagacgtcgtggttcggcatgagcgctctgaagcgttcgaccgcgcccggctcgaggacctcggatgcccaagggaggatgatacccgtctggtcgcgcctgagccagcgaatggcgagggagacggcgacggcgatcgagggcgcgaaggggaccgacccgagcgaggggactagcgaggagcgaaggctgccatcagcacagcacttatcacgtgctcgaacagcgtggcaacttacaatgctcgtagtcgaacattggacttgagcccggttcgtcagtgatccggccagaaaagtcgaggaagcggtcggcgacaagctcggccaacctaggatcgaggacgacctcctcttccgttttgccgactgtcgagcccggcgatcgctgctccaactctgcaatcgcctcgtcaatgatgcacgacgactgtaggccggccggcgcgtcggcaaagtgaaggattgccgaggcggcagtcgatgggaaggccatcaggcgcgggacttccgagaggtcgacgccggccttgtcggcggcttggcgagcgacgaacgagagatgctggcagaacatgtcaaagttatagaggctagcgacaaaggtggcagagggcagagagtcagctgtgattcatagaggcgatgaggggcgatagggcgcaccagggccggatgccgattgtctcaacccaggcgtgccggccgcggtcccagactttgacgggctgctctgtaagcagcgcctgaaagacatccctcggcgagcctttgcccctgtcgggtaacgagcagggcgatggtcagccgaaggtacgctcgtgtggagcagggaggggggctgacggctgcgtgtccaacgcaagaggctcgacgccgagaccggccggccagtcgctcagggcagtgatcagcgtcagccggccgtcgagctggaagctgtgcgcggcggcctccttgatgacggcctcgtaacttgaaggttggaggaggagggtgatatgcaggtcgtcgtgccgggcgagcaggtggcaggccgaggagagctgcgggcgcaagtgaccccacatgggactcgcgacgaagacatagtgacgggcggctgcaggcgagcaggaaggcatgttgtagggcgacaaacctggcgaaagagggtgcgaggggtaagggaaggctgaggtcctttttccggacgagaagaagggccagctcgggagccgacgtcgtcggttgccctcgtcagacccgtacgaccgggtcccgcactcgctggacgactccaccgagagcgctagcgcctctcccctcttttagatacggccgaacagctcccgtcagcggcgtcagcgtggggaaggtcgaggcggggcccgacctgccgccgacgacggagggaggacgatgcgctgccgcacgctcggtcacgagccaccggagatgtctagaatggtcgcgatctgacggtacatgtgcgcacggctagcctgcttctgcgtcgtcgccgtcgtgaggcgatggccgtcgaggccgggccgcccgacaggtcggagcgcgcgctgctggagcacgggatgagaggagcgggtggctccagaggagccgccgacctgcgccgggtccgttcgactggcgcaaggtgggcttcggtagcagacacttgagttggtcggcccggatggacgtcggtctgtgctttgaagcttcggatcgggcgaggaggtcgtcgatggtagatgaggcgaggtcgccggctcgtgctcggcgtcggtgcttcagccggacgcgcagcgagctcagcaggctggccttgtcgctcgctcccgacttcttgctggcagcatcatcggcagcactctcgcaccgagcaatccgtctgcatcagcggcgctcattgacgtgtcctgactcatgtcggcgtcgagagcagggatgctgttctctctcgtctccgagtcttgcaatgcattgccacgggtgcagtgcgtttccacaagaaggccgcctcctgcgccggccgagccaccagcagcggcgacagcagcagccgaccgaccgaccgaccgacaacctcctcctcagccaacgccattcttctgctcgccttctgtaccactagctcgcttcctttgaacgcaggacagtcaggaactatggtcaagcttacgcccgaggtgcgtcgtgccgaagcaggcgcccgccgttccgccgcatcgccggctgaacttgctgcttccctcgctctctcgtcgggctcgcgtcctgccaccggccgctctcgtcgctggactcctcgcctcgatggctctatgcctgtccgcgccgccgcaccagctcgtgtcgcgcgcatcgtcgcacattaacccgctgaaggagagggagctcgagttccgaggtcagtccctcgccgcctgcgccttttacgcgacctccgtccctcgccgtctccaggccgttgtcgagcgcgaggccgaagtccctaaaggcactcccttgagccttgggacacgtacctgacgcatttctgacaaccgcaccgacatgaccgtctgcctctccggacgcgatcgctgcctccctcctcctcgacctcgtgcgtcgccaggcctcggcatcgcaactattgagaacctgggcgcggtcgagggcggctacgactgcctgaacttcagcgacaacgccctcatcacgctggccaacgtcccgctgtgtgagtcaacttgctgccgctcaactcgctgactggatgcgagcagcgagggtcacaggctgactacatctctgctcacttcgacgcagcaactcgcctgcggtccgtcatcgccgccaacaacagaatttcgtccatttcatccgctctcagtatctctgtgcgtaccaggcgatatgtcgtcgctctgcgcccgagccgcgtggctgacctgtcgtccacgcctcgtctcagattcccaacctcacgacgctcagtgcgtcctgccgcgccagtgcctagccctttgagaaggcccgactgaccgccctcccttcttccagctctcacgggcaactcgataacgctcctctcctcgctcgtgccgctcgagtcatgcacgaacctgcgctacctctcgcttggcggcaaccccgtctgcagtgaggagcactaccggccgttcgcgctctggaaggtcgccggcggccggctgcacgtccttgacttccagcgcgtcaaggatgccgagcgggcagaggcaaaggacctgttcctgacggctgggccggacaggcagccgaacgcgctcgcagcgacgctttgcgcatcgacggcgtcgacgagcgtcggcgcggttgatggcgagaaggctgctggcggcaaggccggccggcagatgacggccgaggacaaggagaaggtcaagaaggcgatcctcgcggccgacagtaccgacgagatccgccggctcgagaagatgctcgcgtcgggggtcatcccgggtgaccacgacctgtagggacgctcggtgggccagtcttatcaggagaaaacgtgccgagtgcgcgcactacgagatagatgcgcatccgcgtgcggcgcgtcgggtcttggttcagctgatcgtcaaacagggccagtcgcccacttggagagaaagaaggaagggtcatacagaagaggaggcgatggcgattaaagatgaggaggaagaggcatgcgaggcgtacaacaggatgggaagggcgggtcgagagtcgggcgacgagcggctggaatcagagaggaaggagtgacggaacgcatctattggtagcgcatcgcgtcccagtagttgcggtcgcgctcgtggtcggccgcaagctcttcggccgtcggttggaccatcatcggtctgccctcctcgccagccgacgacttgcgccggccggtcagcccgcgcgagatcgtccgcgtcagcttcagggcggacgagtctgtgccgtccgaggaggaagcctcgatgccgagccggtcgagcgcgagctgaacaatctgcagcagcgtctgcgcctcgctgagtgatcagagagtaagtcagctctgaaaggggcagatgcacggcaggtcaagagacgcacgtgtcgcccgagaaggcgctctggaactcgatccgcagcgtgacagacccttcgtagacgtccttgcccatcgccgacgagccggccgcgccctcgcttgccgggatattgaccgtgaaggtcgctggcgtccgggtgagcgtgccggccgattttttggccgatattgcgcgcgaggctgccatgctgatggcagaatgcgagagctggctgagtgggactgtgatctgggcgatgggtgcgccctgtggatgcgagcatatcagcctcaacgaaggccgctcgaacaggaaagggccggcaccgacattgacgacgagcggccactcagacgcggccggggcgggcgttgcggcagggctgacgtccgcctcggcaaagaccgatccttcgacaggcttcgacacggacgtcgtcgtcgctggggcagagaccgctgcctgctcggccgtcttcatgcggagctgccggacgccatcagggccggcgtccgggtgctcttcgaggtcgagcgccgagtcgtcgccagtgctgcgcgccttctgctgctcgccacccttgccaaagaagggcagggcgttggcgaatgagagccgcttcttgcgcatgcggggcgacgacggtggcgagaggggcggtcggtcggtcgacggctggccgcctggtccgtggttgcttccggcgggccgaacgaagggcgagctgccgccggcagagaggacgatctcgaggttgtcctgcagaacgagcaagcacaatcagcgcagtagtacacaggtagagcaaacttgccgagctcaccgatgtgacggtgacacgggcttcgtcggccaccagctcctggtcggtgaccatgccggtcgagtcggccgcaccgccgccaacgccgaacgagaagctcttgcgacgcggcttcggcgaggcagcagtgttcgtggccgggaagctcacgacgacccgagcgagatgcgagcggtagggccgccagacggacgggtcgacaaacgttgtgaccggggtggtggacgaggcgttgccgtctgcttcgacggccgggatggcggtcgcgcgcaccggcggtgaagtgggcggggagagcgggatgctcgaggtcggcgtgctgtgaagctggatcatctgtcgctcggcgagtaggagaagatggtgggtgatggggaaggagatggtgggaagggcgggaggcgagacaaggcttgctagctggcgagctgcgcggccgaccggacacgggcctgcttgcccaccatgtcacgaggtcctgcctcgtctcgcccgcgaagcccggtcagacgccacccagccattagtcggctgcagaagcagagattgacgctgtcgggtgcaggcagcagggccgaggacaggctgctgttgggctgacgggcttgaactgggtcggcaccgcagcagcagcagcacggccagctcctcgccgcccttggcacaagccagcgaccgcccttcgaccctagactgaccaagcaacacagcctgacgttggctgaagacggaaatcgccttcgccggccgaaagggcgcaagccgagacgcgactcgagtccgaggacgaatcaccggcagggtcgacgtcgagcgcaggcggagacatcgagctgcgggcggaagccaggtcagctcgcccttgacgccgacctccttccacctcccgccgccgttcttctgctcatcgcgaccaagccgactgtcgccaggctgaccagcttgaccgacgttctgcctagtgctctggtccgacggctgcaagggcttctttggagactcggtggcgccgacctcggcgttgacgtcggccgctcgactctcgccgggtctcatcaacccctggtcagttctgggctcgacgacccaagcccgcacgtagtgacattcgaccagagccggctggcgaaggagctttgtgtcaaagggttcctgcgcccgtcctcccaagcaggccgaccatggcaagctaccgaccagctcgaacggcgagagctcggcggccctcggtccggcgaagcgctgtcgaacggcttgcctctatcggtcggttggccacctgttgtcacgaggagagtcgactgctgcaatgaaccttcgcaacgaggacgtctcgctgaggagggtcgaccagtaggttgtgcggcgcgtggtctcgtgcgctgcccgaccggctgacccaaagctgccactgacctcggtcagcatcgaggtcagctctgcagcagggctctatcttgtatgtcggcaagggtgagcgtctggctttatctcacttcaagggctgctgccgccctcctcgccggcctcgagagtcgacatgtccaatctcagccacggccgcaaggacgactccaacggcgacacgcgtcgtcgtgcccgcttgcaattcaggggctggcgtctccaagcaagcaagaagaggcaagcgagcggtcgcaaaagaaggcgcgcacccggcgacccgacgggcctcgtgcaacgcgacggcacgccggccgccgtctctgaagagcggaacagcctttcgattgcgatcgaatcccgcgccgccgccaggccagcacccaacgcgcctgcccttccgtctgggccctcgatcttaaaaccctttcagtcgccggcccgtggctcaaagcgagttcatcccagcacgaaagacgcgactgactttgctcgatcgcgttcgacggcgcgccgactgcttcgcgtcggtccgctcgggctcaatgggagcttctcgaccggcctccccttgattgctcatcctttccgtccagggcagggcatgttgttgacccggcgtcggcccgctgcccccgacgcgtcctgcctggacgcgtttatggccggtcccttaaagcctgagctgaccccggcgagctgttgacctctttcttccatcgtctccttcgctcgtctgttttcgtctccggcctcaagcacccctacccacgctcgtttcgacaccccacgctccttaagcaaacccctctcccccctcaagatgctcgccaagaacctcgccctcggccttctcgccctcgccccggccgccctcgccgccaagaactacggcggtgacattgccgacgtcaaggtcctccaggtgagcactgctcatccgctagcagacgagtccgatagctgaccgacatgtctaccttctcagttcgctgctaccctcgagggtgcgacttttcgctcactgacgcgtcgacgcgtcgcgcttgttgttttgatttctaacgcgccttcctcctctgtcatccagctctcgaggccacttactacgccgagggactcaagaagttcggcgccgccgacctcgtcaaggccggtttcggcgagatgctcgcctcgggcgtcgccaaccagctcggcgtcttcgccgaccaggaggcttcgcacctcgagtacctcaacacggccatcaaggccgctggctttgaccgtgcgtcgacctaccttgctctataggtcaacacctgctgacattgatgtcgtctcttctcagtcttttgggagacctgcgagattgacttctcgtccgtcctcaccgacctcccgaccttcgtcgccgccgctcgtgccttcgagaatgtcggcgtcggcgcgtacatcggtgcctctcccctcctctcggactctaccctcatcgcggcggctacgatcctctccatcgaggcacggcattcgtcgttcgtcgtaagtagttttgatcggtcttgagggaggggagaggaaaggatggagggggagaagggaccgtgcgcgcagcagcccgctgacctccctcttcccccccttgctgtgatcccctttggccctgctctccgtctctcggcgtccgaggtcgccgccggcctacacgtccggacgctctgccccggcaaggacgacgcctgtgccctctgcgcccagcccaatgacctcggccatgacgaggtctgcggcgctcgcccgctctggcgcatcgctcggcacgagcaggtcaaagctctccttgccaagcacctcaagtcgatcgccggcacgacggtcaagctcgagccgttcgtcccgggctcgcacctccggaccgacttgcgcattgccggcacggcctcgtacaacggcccgctgtccgagttcgacgtctcggtcgtggcggcggcaaccttgggcggtcgtcggccccctcccgcttctctttccctctctgctgctgcctctgcctctgccacctcctccctgccctcgctcgacgcctccctccctgccgctgccctcgccacctccagccttctcgtccccctcaccctggtcgagaacgagaagcggtccaagtacctcggtcgcaccgccacccctttcttccctctcgttctctctaccgccggcaccctctcccccgcctctgtccccctcttcgaccactggcgcgccctcatgccgtcgtacggtctcttctcccgcctcctctccctctcacttctccgggcgcgtgctcgctttttcgccttctaagttgcgctcccttcctctgcttccgtctcctcctctcgtctagctctcgaactcctcgccttctgtccatagacccgcctttgtcattgcatgcccgttacaccctaacctccctaaccctaaaaggacgtcgcaccgggtgaagattggccttgtcgtgcgtcctcccttgccgcgccggtccttgctcgatcctgcccgaccctcaaacgctgacgatcttcctgctttcgcgcttcatccttacgagcagcacaccatcgtctctcaaactccatgctgccctgaccccacgcccttcattgtcggtcctgtcggctgcgcgcaaccgctacttgcgttgcggcggctattccatatgcgcgcccgctcgcatcaccgacgacgtccacttggagactgctgcgagcagaggtcgctagaccaccctctgcccacgctctacaactcttgccgatccatgtacgacgactgttcgcgtctgagagctttgcggccgaacgcctcttcggaggcaaggcgggcccgcgccacgcgcgcgagcaagcatgcatccgccctcctactcgttcgcccttcctcctcaccaccacacccaccatgtccgccatgtccaactcgatggagaacgccaagcatcaggcgtcgcgagtgcaggtctttgcggtcgtcgccttctacatggtcgccgccctcattgtgcgacctcgcctcgcgcctcctctgactgatcgacgtcgcgcccggctgacacgcgcctgcctctgcctccttcttcccttcagatggtcattgcgtgcgtctcttctacttgcagtctttcgtagcagccccgcgcgccgccctgaggggccttgctagcacgcccatgaggccggatggtgctcggttcgggctgtaaagctagacacgcggccgcgagctcccgggcaggcagcgtcgaccagctcgcgaccgtgccggcccagctatcggcctcgagggcacctctgctggcccggtcctcaagtgcgccgatcccgggctgtctctggctgtctcggccgtcgcgaacaggctgcgctgctcctgaattaatactgacttgtcgtctgcaccttctgccgcctcccggtcctgcgctcgcccgccgaccagtaacaaatgggtacgactcgcctcgtctttcttttcggcagcccttgatgctgacgccctgttcctaccctcgtcaggtcctcaacgcttcgacgctcccgttgacgtttctgttcgcccagctcgtgctcgccgtcatcctcatccgggcttgcgtcctcttcaggctgctcgtcctcccgccgtttgacatccagctctgcaagaccatcagcggagtcattgtcgtcaacgttgtcggtcttgtctttaacacgctctgcctcaagctcgtcgacgcgagctacttccaggtgaacaagcacgcccttccccctcgtcctgcaatgaagctgacgccgactgcctcgcccctcgcaggtcgcacgcgggctcgtccttcctttgaccgtcctcctggcctcggtcctgctcaagacgatgccgccccggtcgacgctcgtcgccgtcggcctcgtgtgcgccggctttttctacggcatcacaccctcggcggcctcaccgaccaacgagcggaccaacacccagctcggcataatctacggcgtcctttcggcaggcatgatcgccgtccacgcgatcctcgtcaagtggtcgatgcgcaacgtcgccatcaaagacatggacgcgagctacgtcaccaacatcgcctacctgacaaacctgctctcggcccttggcctcttcccgatcctcatcctgacgggcgaggtcgcccgctggccggcgctttacaacaacgacgacgggacgctgagcaccttcctcatcggctcactcatcaccggcacgttcggcttcttcatctgtatggccgccctcctctcgattaccgtcacctcgcctgtcacgcacatgttctccgcggtgcgtcttttgtctcggcgctgcctgctgtaagccagacgagactgacctgcgctgtctcgtcacatttaggccgtccgctcagtcctgcagaccttcctcggcatcgccatctttggcgacgtcctcaccgtgtgcgtcttcagacgatggtgtgctagatcagcagcgaccggtgctgacccgcccccactccgccttcatttcagcccgcgcgccatctcgcttggcctcatcatcgctgggtcagccctttacgcctacttcaaggcgatctcgccgttcccaaccggtaggggcggtcagcagggcggcaagtctgccgaggagggtcgggccggcgagggcgagagcgtgccgatgctcgagaaggagtccgatgccgacgacgaggagatggaccggctcgagcgcgagcatgaggccgaccttgcaaagcgccgagagcgacaggccgaggccggcccgtcagcaggggccgctgaggcttcggcatcaaggtcgcccgcacctgggaccccgacactggcgacaatggagccgacggctgaggagaagcgtgcgagccgggcgcaggccgagcggcacacccaggccgcattcggcgaggggtcggacgacgacgacgccggcgacatggacctcgacgagttcgagcgcgagctgctcgcagacgacaaggccaaggccggacggtcgaagacggccaaaggcaagcgcgactgaccgcctgatcgctgtcagccggggcgcttgtcccgaacatttttctctcggtttctctcactcgcatcatgtctcagtcgaaccacgcgccttgctgcctgtactctgtactgttccggctcccaggccgagccaccatccttcaccacacgcaaccgctcctgtgctctaaacagttatccgtcaccgtccaagcctcgcaggagagagggtaaagtctcatggtgatggggctgatgagatgcgacgtcgggaaacagtcatcaagagacattgaatcgggccgcacgatgagctctggacaagaagacgcgatgtgcagaaacccgaatgaagacatggagagtcgagcagtctgacttgctcaggagagaggggggtgggtgaggggtcctactggagtagctgcgggcgattaggcgtgctgaatgcaaaggattaagtcaaagtcagtcgccatgccttgggcaccaaaagaggctggaagaacgtcacgtacctggacgcggctctgctggatctgcttaatcgggtactcggatgacgtgaccgaagccgtgtcgagcgagacctcgttgcgcttcttgccaaagcggaccatgccggcagcgtaaagagcggcgacgagggcggcaaagacagcaacagtcgcagcagcaccgatacctccgctagcagcgttcgagaggccgccgtcggacgaggacgaggtcgccgtcgagacactggtggcctgagcaccgtaagccgaggtcgaggaggggtaggcggcgacgcccgagttacggtcggccgaggtcgttccgcaaatgtttgagcgatacgtgaagaatgagccgacgtcggccccgcagccaccgctaagtatagacaaagcgaaaaaaaaaccgtcagccaacttaacttgagcaagatggaccttgctggtacgcacccgtagaggcagcccttggcggccgacgcaaagtcgtcgttgtcgcacatgcacgacttgtcgttgctagagagggtaagcaggtcagagtcaatgctgcagttgaggcaagaaggcggtcgaacgcactagtcggtgctgctgcacttggcagtgacagcagcctggctcatgcacccggtctggcaaatgctaaggctgcgtgacgggaagaggagataacaagtcgttgtcagcggctgcagcaggcctgagctgcggccgtcgaaagacgtacgtcgagccgtccgaagctccagtagccgaggcagcaccagctgcgtacgtgtaggtcgggacgagcgagccgcaggccgtggtgcgctgcttgtaaaagtcgatgacgtccgagccgcatcccgatctataacccaagtgcgagtgagcagtgggacatgacatccgctgggtgtcaggagaagcacgcacttgtagagacaagccttgacgctggtggcgaaggagtcgttcgagcaaaggcagtcctgctcgaggctgaagggagtcagaaggaccgtcagcgacctactcaacgactccaagccacgtaaaaggcttacagacgcactagttggtgccgcactgggccgaagacgcggccgtggtcatacaggtctcctggcattcagtgtagctgaggaagagtgaaggccaggttggtcagccgagtcgaaggcggccgggtcatggcggctgggcagatgagggcaacggacgcagcagaggccaccgcggcgaacgagacggcaaagaggaggacggcggcgaacttcatttcgagcggtggagcgaggaagaaagagcgaaggaggagtaagggggggcagatagttgatggagcaagagacagtcggccaagagatctcttttgaggtgagcgggcgtcctccgggaagagccggggcagatcaggactagtaatcggatagaacagcccgcaagggcgagccgggcggatccgtctgccaagcgcgacgggtcggccgccaagagggccccgtcgtattctctgacacgacaagaagtcgaggaaggagatctaccgatctgattggagcggcggtaagtcaagtggaggccggcgactgtgccgcagcatcttgaacgtctggatggaagcccacctcgcccatctgtacacatcagcgtcctgtccatgagggggcctcgcaaggcagctgatcgaacgatgttcgaaactaggtgaggagggcagggcgtccggcccgcaaagcgccaaggacggacaggcgctccggtgtcggtctgcggctcgaattggacgctcccttcgagggcgtcgacggtgctattcgaccttaccatgaccagagagggtactcggccgtttgacgagagcggagcgccgttaagccagaggtgggtcgctcggaaagggacgtctgctactgctggcacacgctacgcgcggctgtttaaagagccactgggaccctacctcagaacgctagactcctcgtgctgctgtcagccatcacgtcggctcaaggcgaaggtcagttgtcgcgagcgatcgccttgaggcgtggtgagggagaccgaccttgggcagaatgttcggcttagcgggcgatgagcacgagcccgccagcgacgagcagcaggccagacgcgaggtctcatcgcaaggcaggctgcagaatcagctagctccacttcttccacttcttctcaagagagcgacagagccgcggctttggaaaggagagagtggcggtagcgcatgggttcagttagggtgaaggtcgagtgcgccttccaagatgattaacggtcgccggaacgtcatgcacgtctcctcacattgagagcggcgaccagtctgtccaatgctggcgcgagaccagaacgtcgagccgtctgtaaccaccccttgtctgagcgaagcgaaggctagctaggcaagagctcattgacggccgagggttgtcgagcggtcgagcaggctgcctgccgagctcccggttgagctcgcctcgaccatggacgtcgattctatggcggcagcggcgcgcgagcgatccgatgagctcgacgctggccagctggctggtcttgaagagtgtcgagacgctacatgatggtcggtcgacgggagggttctctctcgaccgccgctggttggctcggtgacgccggtcgcgcagcagcgctgctcacggtcgtcccccctgaagtctggcccttctcaaaagaacaaaaggcgaggcaggtgccatcgagcagaagatacaacatgcatgcgggtcgtggaaggtcgtgggagcagagaatcgcaaacggcgaggcaaaggggtcgacgaggaagcaatgagagcgaaggcgagagcatctagtcgtcgacgtcctcggggtccccgatgccgtcggcgttgatgctgaagagggcgtcgctctctggcaggcagggcgagtcgtagaccttgcacttgcggttggcaccgcggtgcttcgagaggaagagccgagtcgttgacgcgtgggccctggagagacatcgaagggtcagccgcagcgccgtgaagccgatgcttcagcagctcagccgacgcacatgatgttgccgccgatcggcttcttgtcgggccccatcatggcgccgccgtcgacgctggcgacgacctgattggtgacgacaacggcgatgccaaactcgtcggcgagccgcattagcgtccgcaggaactttgcgaggtggacttggcgctggaaggaaagcgagacaaaggtcagtcgatctaccgtgagaaagagcctcttgaaagggtagcgcgggaacgcaccgcgctcagctcgcctcggccggcaaagtcgacgcggtagagactcgtgcaactgtcgacgacgaggagcgaaaagcggctctcagccatcattgcgctcgcctggagcagcagcttctgctggtggtccgaattgtacgcccgggcgtaggcaatgttgtcgaggacctcctcgcccgagaggccgaagcgctccgcaaccgagaggacacgcgacggccggaaggtgccctcggtgtcgatgtacaggcacttgccctcgccgccacccatgctgacggggagctgcgtaaaaagcgagccgagagtcagtttagctggcgctcgtgtaggagagggcgaccatcgggcgcacctggcacgtgacggcgagcgtgtggcagagctgactcttgcccgttcggaactcgccgatgagctcggtgatggcacccgtctcgatgccgccgccgaggagagtgtcaagcgtcttggagccggtcgagatgcagacgagctcagaccgccgggcatggaattcggtcgcggtcgtgaaaccgagggggacaagcttggaggctaaatcggaagagacgaggtgaagtcggtcagccctcagatcagaggcagatggcggaggccggtcgggaccaagcacgtcagacggaccttctgtcagaatcttgtcagccttggcctccgagatacccttgaaggtgatgagctgcttcttgggcgtgaaggcgacggcctcgaccgtgctagagcgaacccagcagataggaggggtcaatcggcgaggtcatagcggcggccagacgacgcgaggcggaagacacgtactagagaccggcctcctgaagcttcttgacgtcggccgctgagatgccatgctcctaacgggagcgggacgcagacggcgaggtcagccttggcgctggcgaggtaggaaggtggagcagagtcgagggaaggacgcggttggactcacgacgagcttgttgacgaggaccgggccaaacgtctcgtcgtcgtcttcgagctcgccgtcgacgtggtcctgctcgttctcgaagtcgtcttgtgtctgctgcgaggccatcgtcctgtcgtaccaaggtgttcgtcggtggcgaaggtcggccggcgcgtcctccgaagctgagagcacgcgcgtcgccacccgccgctaccatggcaacgtacgcgatgcgtacgagaccgatctcgctccactcgcgcactcatcggacaatgcggtcaagctagcattttacaacagatccgccgggaaacgcgaccgccctgcggctctcctaccgccggcgcatcgctcaaagctccgtcgcaagctttgccgcgagcgcctcgaccgtctccgaagcagtcgcagcgggctcgcctggcggccctcgagccttgcccgactcgccatcgactaagttccagcgctcggcgagctcagccctcttctcacgcatgatggcgtccagctcagcctagcagagggcaacagagccctgctcgtcagtcgatgaaagaacaaatctcaggtcgcagaaacgcacctcaagtcgcaggcccttggcgaggatccggctcgcagagtcagagtcgccccggtacatgactatcaaagatgagaggaggctcaacgtcagcagcgagcgccgtaacggggcaaggtagcttggccgcaccatcgcgtccgccctcgtcgatcggcaggtcgaagtggaagcccctccgcgagcccttgaacggcgcctcgccgacgacctcttggttgatgagcacgcgagggacgtcgggtgcgacgcggtcgatcagcgaggcaaagggctgcagcgtcgatgatgatgtttatcagcgtcatagagttgggggacaaataagctggaaaaggacgcacgtggactttgagcgatgtgccaaagacgagcagaaggtcgcagctcgccaggtcgccgaggtgcgcaaaaaacttgtctggcagcgactcgccgaagaagacgatgtcgggcttaacgtaggaggttgaccggcccttgcagctcggaccaggacagagcgggacggtgcctggcggaacgaaagcgggatgtcagttcttgaggcagagggacgtgcgaaggaagtcatgtcgcgcgcaccggcctcaacctgctctttgacccatgcctgtggagcctccttgtggcagatgatgcagcgcgcgctcgcaaatgagccgtgagcctcgacgatgagagagtcgcgcacaccggccacacgctcgagcctgagggcatttgaggtgttgttagccagccactcgcatcccaggtgtcggcaacgtccttctcacgtgtcgatgttttgcgtaaagatgcgctgcagcaggccgtgcttttgaagcaagaaatagaggtagtgcgtgagggtcggcaggaacttgcctgctccgaacaaaggaagcccagtcagcgatcaggtggtaaggaaagaacgctgcgacttgccagtcggccgagacgtacccgggtagagctcctttgcgagctcgtagaacggtttcgggttcgaccgaaagtagtcgatgtcgaagacggcctcagggtggggaaggttgtacctctcgaggttggcgtacaggcccgtcttcggcgagcggaaatcagggatctgttgtggcgggtcaaaacgagcgttgagtcagtaggcagacccacacgatggactggcagcggtgggcgagcctagtacggacacctgcgttggtcgacgtgcccgctccggctaggatgacgatgcgttttgctgacaagattgggcaggcgtgagaaaaaagggtgtcagcgaacggcggggggttgttgcgtctcgcaagtcaacaaacctgctccactgcggatcaaccgggcgacgccttcgagcgtccgttcctcatccaactcaaaggcgccctgccgcccatcttcctgaaaaagcaacaaagcagcgactctgtgatcagcgagccgctcggcaagaggaagccgcagcgtcgttcagacgaaccgagctctgtgccgaagcattagcgttgtctcttgcaagctgctcggccagcgtggcctccagagagggcagagtcgccggcacggaggcaatcggcggcgcgaaagtagagatgcctgatggcgacaaagccgaaaggaatgtcagcaacgaaatagggtggcaacagacgaagctcacagacataccggcaaagcccgtcagttctgacgccggagttggtgccgggctcgcaaacggcacgtgcgaccggaggaaggccgtgatctgcgcccagtcgaggtgtcaacggacgctctgctaacggctcgcctcagcgacccctcagcgacggcgccatcggacgcacctgatcaacgtaagtctctgggagctcgtgctgaccgacaaagcgggcagcggctgcgctcggcggctctgatgacatagctggtcgtcagcttcctactctcccagcggcagcgagcggcgggtcggccctacccttcgtgttgtaattgagctcgagtggcggccggtcatctgcgacgtcgacgctgagcttgaagtaggacgctggagaatgcgagcttaaaatcagcgtagggatcgagcgatgaagggcgaacgagaggaaaggacgacgcacgtcctgcttcggttccgtcgacgaccggcgggctctttgcattctccgcgaccgcctcctcgtacgccgcaatcacctcctgatcggcgacccgcccagggtcgcgcgtaaatatgcgggcggtgaagtcggaggcgcccgtgacgatgtcgccattgggcagggcggcgacggaccagactgagatggctgggtgctacggaggcggacaaagggcaagcatgagtgagataaggacgccgaggaggactcagagtaaacggaccaaaattgtttgaatctgcttgccatctggcagaaacgcgacggaaaaagagccgtgagcttcgttgcccgcagactgcgatcgactgtctcgcgtgtcaaaagacgcactgctccagatccgtacgcagtggtcctcgcccgccgacgccaggtcgccgttcggcaggatgcagaccgagtagacaaagctcttgtggccgacgaggacggctcggagctcgccgtcaaaagaccagacgcggatcgtcccatcattcgaggccgaggcaaactcgttgttgggcaagaggacgagcgagcggacgacgtcggtcgagtcttccaacagcggccgcagatgcatgtgtcagcgtaaagcacccgacgagcttcttcgccagaggttcgattagccggacgcacccttgaatttgcggatgacgttgccctcgtcgtcccagtggatgatggtccgatcggcgcttgccgttagaaacgtccgcctgccatcgctcctcccgcactgctccggctcaacaacgatgcccgcccaaacggcctcgtgatggccaccctcgaggacgaggatgcactcccatgaggccatcgaccaaacgcgggccgtgcagtcccacgaggtcgagatgagcagcggctccttctcgaccgcgcctggcggagggaagcgtggggccgcggcaggaacaggggacgagtgcgttgagccagagctgccagggcggtagcctctgcggcctgccgacgccgcacgccgagtgggcgaggccgtcccgtatggcctaccgccatctccgccggcgctcgcaaagtcggtcatcgtcggcgtcacggccgagagaggctcttccggcttcgaagccgaaggcgggccgaacgacggcgggctcgggattgaaagtgacagcggcctgttcggccgacgttgctgcccaccgctgctgccagcgctgccgccgacaggtgacgacgtcccggacgagggaacgctggccgagcctcttcctccgctcgagcaggcatgggcccttggccggcctggcaaggtcgcagcaaacgggacggcatgtgacgtgctcggcagcgtcgccgccggcgagcaggcgaccgaaagcggagtgacggcccaagagggcgtcgaggtcgagagcgagcaaacattgtgagcatgacctgcgacgagcgagggagagtatccatctacggtcagccggtcccgtccgtctgctctcaccgctcatacacaggcacacgcaccgactagcgtcctgatcggctgctcgctcggccgcggaccgtcctcccggccgggcgtcgcgcccgcctcgccatcgacgctcgacgcccagctgccgcgcgagggcgcctcgtgaatgaggatgagaccggcgaggttgccggacgcgatcaggcctgaggggcgggtcgagaggggcacagaggcatcagcagagaggcgtcgggtgcgagcgcatccaacagcatttcctcctccgcacgctgcgcaatcgtcctagaccgatgagatagaggcctcaccgttcgcatggttctcgtccgggtatacgaaggcgaggctgttgacgtacgcgccgtggccgagaccgactgcgctcagccggaactagaggcgggcgatagtgacgtgcgcgcaggacaaaagaaggcaagatcgtcagcctcattgctacgtttcagctacatcgtgccggccagagattcccagacctcgctcggtagggccttagagaaagcccggcagcgagatcgggtgttcggagcgtgactgacctccctctcggccgtgcccgcccggctccaggcgcagaccgtctcgtccctgctggcggtaaggacgaggtccgagtaaggcgcgacgacggccttgacatccgactcgtgggcctgcgcgagtgcgagcagtagcgaatcgcaatcagcttgggtcgttcgggagaggaagagcggaagcaggatggagcgagcgagcgactgctccttgcgaccgccgcttccagcccaggcagaggggacgagatgggtcgcatcgtccagcctcgctctcgctgctgtcatcagtctggtttgacgcacctcgagcgttgccgagaagcggaatggcggagtgacgagcatcgggtgcatcgaggttggcagggagacgggcggacgacgcccaagcagcagaagatcagcagtcgccgcgcagccgaccgagcgaggcgacaggcagggacagcagtcgacgatatgatgacacagacttccttgtcgctttgacagatcctgcagcatgccagccatgctttcagccatcttgctggcgaggacgggccatggtcctgtctctcccggctagccatgacgtccgttgcctcgcccgcgcgcgcttcgcccatcgcacagcagcacctgcacaacctgtcaaccgacgacgacaactctgacccgacttcgacacccgacctcgaccatggccagcagcagcagaagcagcagcagcaagccaccgccgccgtcggtcctcgactcgctcctcgccctgccagcgacggtcgcccgctcgccgcggctccacctcgtcctcctccggtcgctcctcctgctcctccttctcggcgccgccgccggcctctcgtcgaccgcctactttgttctctactttacctggggtcgcgtcccggcctttaacggcccgctcgagctcacctatgggtcgccaaaccatccgccgcatgcgagcctcgccctgccggcgaccggccactggcggccgggccagccgtacgacgtttttgtcgagctcgactgcccgttgacgaaggcgaacgtcggcctcggcaactttatggtcggactcgacatcctcccggacggcggcggcaacgtcaagaacccggcgccgctctacagcgcgacgcgctcggcccttctgacgccgccgcccgtcctctcgccggccaagctccttccgctcgtctggggcacaccgtcccggacggtccggctcccactcctaggctcggtcatcctcgacgacggcagcaagggccggagggcaggccgcgtcaccgtttgggtcggccgggaggacggctggcgcggcgcgggcaagagcggcggtctcggtgaggtgcacacgaccggcgcaaggctcgtcatccaaggccggctcagtggcctccggtgagcaactcttctcttgcatgcatgcatgcatgtcgacgccagctctaaccgctgcatttcatcgctcccgacttgccagctcgctcctcaccaaccatccgctcctctcgctcacggccctcacctccgcctcgctcctgacgaccctcctcgcctcgctcctcaccttctacctctactcgccctcgctccggctcaaaccagcctcgacgtcctccgccgccgccgccggggcgaagcctatcgccgctgagccgggaggggaggctcgccttcgctcttctgcccgagagcgggcgtgggccgcaaccctcccgcgctcgatggacgccatcaccggcgacgtctctggctcctccgaatctggctcgactgcctcgtccctcctcggcgcaacggcagccgacgagcaggcagaggaagccgacctcgcccggcttcgcgcaaaggaggccgaggtcaggcgcatccggctcgagctcgaggcggccgaagaacgcgaggcggacgaggcggcgagtcgggttcgggcagagcgggcggccgcggtcgctgctgctggcacgagggagaaggcagcagatgatgacgagcggtcgttgctgggaggcgtacgtcctcacctctttccactacccacttgagacgagacccattggctgacgacgaacgcgatcgatccatgcgtgacagtccgggaccacgcccagccaccggacatttggcgcaacgaccgtctcgagcttgagttcggagtcgacggcgccgacgagcggcggcggactgcgctcgcgttcggccggcacgtcggcttcgcaggccctgtaaactcgagtctcagcggtcgccctcttttcgacaggccctccccctcgtgtactctatccttgtcatcccatgcatttccaccgttttacccaagtcgcgagcgcccgtcccaattcccgctcgtccgccgtctgagcagaagatcagcgccttcccgagccagactcttccgtttgcggtcttcgtcatcaagcatagagtcttcgagcatggattcattgtccgctcgaggcagcctagtcccactcgtcgtcgctctcctcgtcctcgctgttgcccatgtcgcccttgcgctgattgagcgccgccgcgagcgcgcctgccagatcgccacctcctccgccgccggtcgaaggagtgccatcggccgccgaggcggcgtaggtggctccgccggcgagcgccgcgcctccgagagcaccagcagtgagcgcagcagccggaggcggaggaacgcctctcggaggcggaggcggcggcgccgccctcgcttcgccaccacctgcgccgacctgctcctcgtcgtcgtcgtcgtcgtcgtgagaaggcttcttgaagccttggatcgaagcgaggaggttcgcacgcccaggctgtggagggggcagatcgagtgctggcgctggtgctggtgggggagcttctgctctcggtggcggcggtggcggcggaggaggtgcgccgggagcagccgcccgcgggggagccatcggcggggcaggtcgtccaggcggcggcgagtgtcgccgaggtgacgatcagcttgaactcgggccgccgctttgtctgacgtctcgccgctcgaccatccaggcacgctcaagcgccggcccgagttcaagctgatcgtcacctcggcgacactcaatgctgagaagttttccgagtacttctttggctgcgccatctttaccgtccccggcaacacgtacccggtggagattctttacacaaaggagcccgagtccgactacctcgacgcctcgctcatcaccgtcatgcagatccacctgtctgagcctcccggtgacatcctcctcttcctgaccggccaggaggagattgattcggcctgcgagattctctacgaccggatgaaggcccttggctcgcaggtgccgcagctgtcgatctacccaatctacggcgcccagatctcgtcggtccagtccaaggtgtttgagccgacgcccgagggcacgcgcaaggtcgtcattgccactaacattgccgagacgtcgatcacgatccccggcatctactatgtcatcgacccgggattcacgaaacaaaatcactatgatccgaagctcggcatggaccatctccaagtcatggtgcgttggccccctcgtctgtatcgttgcacacgccttagcgcctgacgcctcctcttccctccttgcagcccatctcgcaggcgcaggcccgccagcgctcgggccgtgccggtcgaaccgggcccggcaaggcctaccggctttacaccgagattgccttccggaacgagatgttgcccaacccggtgcctgagatccagcggaccaacctctcgtcgacgatcttgacgctcaaggcgatgggcatcaacgacctgatcgcctttgactttatggacccgccgccggctcagacgctcgtgcgtcctgcgcgtcactcggtctctcggcccgtgctgaccccctctcgcctctgcagatcaccgcgctcgagaacctgtttgcgctcggcgcgctcgacgacgagggcctgctgacccggctcggccgtaagatggccgacttcccgatcgacccgccgatggccaagatgctcattgcctcggtcgactacggctgctccgaagagatgctcacgattgtcgcgatgctctcggtccaaaacgtcttctaccggccaaaggacaagcaggcgcaggccgacgcgaaaaaggcaaagtttcaccagcccgagggcgaccacctgacgctcctgaccgtctacaacggctggaaggcgagcaagttcagcgcgccctggtgctacgaggttcgtgtctgccatccgtccgccagcgatggtttctggtcgactgacgctcgcctccccgaccgcgcccgacagaactttatccaggcgcgcaacatgaagtcggcccaggacgtccgcaagcagctgctcggcatgatggaccgctacaagcacgacatcatctcggccggcaacaactacaaccgcgtccgcaaggccatctgctcgggctacttccgcaacgcgtgtaagaaggacccgaccgagggctacaagacgctcaccgagggcacgcccgtctttatccacccgtcctcggcccttttcaaccggccgcccgagtggtgcatctacaacgagatcgtcctgacgaccaaggagtacatgcactgcgtcctcgcgatcgagccaaagtggctgtcggaggtcgcgccagccttttacaaggtcgccgattcgaacaagatttcaaagcgcaaggcccaggagcggatcgagccgctcttcaacaagtacgagaagcccgacgagtggcggatctcgcgcaccaagaaggtcacccggtcgagtcaggtgcttcgccttctttcctgctccgcgctcgaggcgaccggctgctgactggctcgcccccccccccttttgcagaccttcggctgagcgcctgcctgtctccgtgcttggccatctgagcttcctgtcttatgctctctctctcgtgcactgtattctcatgggttctctcacgctggaacaatgaagaaaaattggcgatccttcgtctctcggccctgctctcttgtcaagggccggtttgagcgatccgcgcgcggcaaacaccgtgggaatcctctgcatgtcgcgctgattggctggatctcccacgcgcggagagcggcggcggcggccgcgcgcgcgggcctcgcagttcgtttcgccttgcccctgcccgacctaggatcccctcagcaagcctcacctcaagtcgacaatggtacgtgccctctagatctcgctactgctgctgctgcaacggtcaagccgcggacgacacacggctcgcggatttggacggcatgcggcacgagcgaggttgagctcgccctgtcgttggcatcccaccggctgcaccagccgcagctcgagctggctcgcctgcctttgaggaggcccgagcttccgtctggtcttctgcgaggcagtcggactggctcggcctacgaggcaccaggaccggctcccatgccgtctctggaccctcgagggaggcagcgcctctagcctcgagggagtcggctcgggccacaggcggagctcgggtgccagccgcagcgggcggggcaggagcatggtcaggccgccggccaggtggcctgcgccagcagctggaaggaagcgtcctacctgtggctggccatggtgccattggccatcgagcaggcgcgatgggcagcgccgactggcggagcctctagctcagagccgtcgcagcacgagcggcaccggccgtcctcttcgaccttgcatcgtcacggcctcgtcgacgtcgtcccactcgcataacagcagcagcagcacgcccttgttcgtccgccagctcgcagcaggcgctgacacggcttgtcgtgctctccttgacttccaacagccttcccagaagaccttccgcaccaaagtcgcgctggccaaggctggcaagcagaaccggcccattccccagtggttccggctcaaggctgacaccaagggtacattcccatcagcccgtggctcccgactcaatacgcgcccatgctgacccgaccgctgttcacccctcctcgcagtctcgtacaacaagaagcgtcgccactggcgcaagacgaagctcaacctctaaacggttcctcttctctcttctggaggccgcggcgcgtcgctcggccgctgaggagctgtggtcggcgatcgacacagctgctatgccatgacccacaacgacatctgtggcagggaaggcgagcgcggggtcggttgtaggcagggaaggaggatgcggcagggctggcagagcgtgctgacctcttggcgtcggtccaagcgacttgctgactgggtcgccgtggcgccggcggcacgtgacgctgcagccctaccgggtgagaggattgtctgatgagggcacccaacgatgcctagaggacctccaccttccgagccggtcctcgtggggaggacgcccagcgacacttgtcgtcggtgtcgtcggcgtcggatgacgagaggggtgtcctcgttgacggacgctcgttcaaagagctcgagtcggccacactgcggcgcctgggagcgggaggccgcgcgggccagctaggcaccgactgtcgaaaaggcgccttcgacgacaatccacagagggccttgcatgcgaattggtctggcgatactcatgagtcgaccgtcgtgcacactgaatcctccaccctctccgagggcgactttggcacgtgctctcttgcaaagttcgcgaatggcgaagactttgtgcagacatcggagggggcagcagtccaaatccgactccctgcctgcgccggcctcgttgtcattcactctttttcgctgcacttttcactcgtgtcgcactgtctccatcccgtctgctcgctcgcgcgaaaaagggacttagggttacttcccggtcagctgagggcggtctcgagagtaaccgcccagaaggacgtgttaggcgcaggcgggaccgaagtgccgccctctgcctccctgttttaatccgccgagtccccttccctcctacctgccctccaaccaccacccacacccccattccccccacctctttcccttctcctttcctctttctttcctttaaaatggccactctcgcgaccttcaagatccccgagatcaagaatgagcccatggtgcgtcctctcgacccacgtgccgtgaccggctcactccgaaacgagatgatgggctgacggccttcgccacatatcgcgcagatgaactacgctcctggttcgagcgagcgcatgaagctcgaggccgccatcgacgagatgaagagccagctcccgttcgaggtcccctgtgtcattgacggcaaggccgtgcgtcccaactctctctcgcgcccgcgatacccgccgcccagagaacttggcccgctgaccttacgccctgccctctttcccgccactcgtctaggtcaagaccggcaacgtcctcgagcagctccagccccacgctcacaccgagaagccgctctgcaagtaccacgttgccacgcccgagctcgtcgccaagtcgatcgagtcggcggttgccgcccaggccgactgggaggccctcccttggaacgaccgggccgccatcttcctcaaggcggccgacctcgtcgccggcaagtaccgctaccagctgatggccgccaccatgctcggccagggcaagaacgcctggcaggccgagattgacgccgccgccgaggtgcgttcctttgagcgactgcgcgcgtccgcacgtactctcgctgaccctaccttctgcactttctcgcagatggccgacttcttccgctttggtgtcaagtttgtcgagcagctctacgccacccagccgaccgagaactcgcctggcatctggaagtgagtgtctcgcgcgtttaggcgccgtctctgtgtcggacgcaggcgctgaccgccctcctgcttctccctacagccggaccgagtaccgcgcgcttgagggcttcatcctggccgttacgccgttcaacttcaccgccatcggcggcaacctcgtcggcgccccagtcattgtcggcaacgtctgcctctggaagccctccccgatggcgacgtacgccaactacctgacgcacaagatcctcctcgaggccggtgttccgggccccgtcatccagtttgttccgggagacgccccgacgctcgtcaagcagtgcaccgaccacaaggagtttgccggcctccactttaccggctcgactcacgtcttcaagggcctcttcaagcagattgccaacaacgtcgacctctaccggtcgtacccgcgcgtcgtcggcgagactggcggcaagaacttccacatgatccacaagtcagccgacctccgcgagacggtcatccagtcgatccggtccgcgttcgagtactctggccagaagtgctcggccctctcgcgggcttacgtcccgcgctcgatgtgggaggccggatggggcgacgtcatgaagaccgaggtcgagaagctccaggtcggcccgtgcgaggacttcaagaactttgtcggccccgtcatcaacgaggcctcgtacgacaagatcaccggcatcattgccgaggctaaggaggccggcggcgaggtcctcgtcggtggcaccggcgacaagtcgaagggctactttgtcaacccgaccgtcatcgtcaccaaggaccccaagtcggtctcgatggtcaaggagatctttggaccggtcctcaccgtcttcgtctacgaggacgacgagtgggaggcgacctgcaagattgtcgactcgacgacgcagtacgcccttaccggctcaatctttgccgccgaccgctcggtcgtcgtcaaggcccagcagctcctgcgcaactctgccggcaacttctacatcaacgacaagtcgaccggcgccgttgtcggacagcagccgttcggcggaggccgcgcttcgggcaccaacgacaagtcgggttcggcctcgatcttccagcgcttcacctcgccccggtcgatcaaggagaactttgtcggcgtcgtcggaaccctctacccctcgaacgcatagatctcggtttcttgtctttctcctcacgatgtagcccacgccccacgaccccctccctcaacttcatgatcccttctctattccttggccgagctgcgcgacagggaaagcagagcgagcaacggcgagcgagggcagcgctgcgcttcggcccagcgtctcccatcttatcagccgtccgttttgtcgacgccgggcatcaagagaaaggatgactggacgacaaaaggactggaggaggacctctcagattgccttcgaagcgctcctccgaaagaaggagggcggccatcaggtatcggctccgactggatgcgatcgggggcagagtagtgcgctcgctgtttggaatgagacaatagcagtgtcctcatccaggctggcacggctcaagcaattgtaccagaagtgaggcgacgaggatcaaggcatggcctagtgttgcgaattccagcgtgcagtacaggaactgggtctgcggcctgcacaggggtttgcggtgatggaaaaggcggagggataagcccttcaggacaatgagtaggggacatacgcactcctgggcctttggcgatttggttgcttgactgtcagtctcgaacatggctaactgccagagacatctgagggacagggagaaaaggacgtgtatggcagcaaagagggctgcgtatgtacattacctcctttcccgctacagccgccacgcatggaaagcagtctcaacaacaaggcggcgatgaagtttgattcgcctcagggaatgcaaagaagaagcgccgggcgcgacaagtcggatgctggaggaaacgaggacgactaatagtcgtttacatgtcccgctccgtcgagcaatcgctcgatccctccagggcgcagagcatgaaagaacgtctcaagtccatcagtgacgttcagacaccgtatcgatggtatatgcggcgcctgaacgtaggaaagtccgggaggagaagggaagctgacctgcgaagaggaatctaatcatacgcttttgctgtccttccgactagcggcaacaacgcggcccaccatacgaaggtctagcaaataatagggttggctcccgcctccagtctcctccttctcctcatggtcagccagcagcgtacaaggacagagatgaagtctgcatgaagtgcaagcccggcctgcaccctcccgagcgccagtcgggcaaggaagagctcgacatacagtcagccgtaaagtccgtactcgtcggtgtcacctgccaggtggtctgtcagtgctctcgcctctaagtggcggtcagaggcagaggtcgacggcaaagacgtacgcaccggccgcacgatcgcttcagccgcgcgacgtggatgcgccggcgggttcgacagcgaccgacccccttcgacctcgaccttaacctccttcgcctcgccccctgctcccttatctacccagaccaacagcagctccagcgccaacaactccaggcagcccgagaaagcgcagcgccgcccaccatgtcgcgcttcgatccgtacgcttcaaacggtggctcggtgcgtctcgccgaggcggccatctctcagcccccctccctcggctcgtcctgacccatcccccttccatcggccttggccacgcagatccttgccatcgcctccaagacgttcacctgcacggcagccgacactcggcaatcggagggctacagcatccagacgcgttacgcgccgaaggtcttccgtctgtgcgtcttgcgcttctgctcaacctcagcgtcgagctgctcggtggccactccttcctggtgcgccttcgaccagcgagctgacgccacattcccgaaccccctcaggaccgacacggcgacgattgccgtcaacggtttcgctgcagatggcaaggtgctcgtccagcggatccagcagcggctcgaggtgcgtcctgccggtgctgccggccgtcgtgccaccatcagcttcgctctgcagctctggcgagcctgctcggacgtgttgcgccggttggcatgagcgacgtcttgcatggtaggtgagagagctgaccaggtcggcgtccatcgcagtggtacgagcacgcgcacgcccggccgatgcccatacgctcgctcgcccgcatggtccagacgatcctttacggcaaccgcttcttcccgctctacacctacgtcatcctcggcggcatcgacgagacggacggtgcgtacccggacgggcttgtgcgaccgcctccgtgcttggagggagctgacctggcggtcgtcttcgcgtaccaggctccggcgccgtctactcgtttgacccggtcggcagctacgagcgcgagttctgccgggcggccggtgctgcccagtccctgattcagcccttcctcgacaaccaggtgcgtgttcgcgctgtcggcccttcgctgcgcacttgctgccggcggctgactgtgattctcgcacacaccgccattcagatctacttcaagaacatgacgtttgcagagggcgccgagaagccgacgccgggcgagctgccactcgaaaaggtgctctcgttgatcatggacacgtttacgtcggcgaccgagcgccacatcgaggtcggcgacgggctcgagatctacgtgacgctgtcgaacccgtccgcccccgagccggtcgacggcaagctcgtcaagcagaccgaggaggagtgggcgccggcgctcgagggcttccgtggactcgaggagcgtggggtcgccgtcgagtggctggagagcctcggcagcgtcggcgggcgcgagacgcggtcgtgcgtcctccgccgtgagctcaagaaggactgaagcgccctctttgcgctggggatgaccatgccgctcttgacgactgttgtgcttgaatgcaaggtttcctctctgggtgagaagtgggcctagttgccgatgacagccgacggccgagacgacgaggtcggccctccgcgcctgctggctgcccgccgtccccatccaccatctcactcagccttcgacccacctcgcctcttctctcgcacgtccttccctcgccagcagcttgtgaatcctctgaccggaccgcctgagcctcctcgaccatggccgcgcccttgtacacgaccgagtctggccgtctgtggcacgccggccagctcctcctcggtgcgtcggccgcctccagctgtcgcctccgttccgaccgctatcccttgatcttgcgcatccgtccctaacctttatccgtctctcgtcctctgctgccggcagtgaccgtcggcctgcctgcgcgcggcaagacgcacatctcgcgttcgctcgagcgttacctccgctggcttggcgtcaagacggccgtcctcagcttgggcgactaccggcgcaagacgatcggcggggccaagaacctgccggccgactactttgcgacaggtctgtcgtctcgctgtcctggcttgtcgcttgaagcccatgcccgagctcacgcgacgtcgactgccgactgcccgcgccaggcccaaaggcgaaagagacggaggagctgaggatccgcatcaaggacgggctcgagcagcaggcgctcgatttcttccagaaggagggcggccaggtcgtcatctacgacgcgaacaacggcatccgcgaggcccggcttgagctctgggcgcgcttcaaggcccagggcgtccatgtcatcttcctcggtgcgctctcgtcccgacttcactgcgcgcgcgcggcttccgactaggccggcctgacctctccaacgtcttcttctccactcgacagagagcatgtgtgatcgagacgacattgtcgaggccaatatccggagcgtcaagctctcgtcgcccgacgtgcgtcgccctgtggcttcctccgtcctgaccagcccggtcaccagtgctgacgctccgcttccgacgcagtaccgcggctggaacgccgaggaggcgatcaaggactactggtcgcggatccgcgacctcgaaaagagctaccagcccattattgacccggacgcggcgtggatcaaggtcgtcaacgtcggcgagcgcatcgtcatcaaccggatcgagggctacctccagtcgcggatcatcttcttcctgatggtgagcctcctccatgaaatcttcagtcgctgtagcgagaggactgacggtctactctgctccgtagaacatccacaaccggccacggactatctactttgcccggtcgggccagtcgctcatcgagcactcgtacaaggccgactcagacctctccccggccggctggtcgtacgccgaccggctctactcggccgtccaggcccggcggcggcaggtcgcagatgagcgtcgggcgcggggcgaggtcgtcgaggagcgcgagctgagcgtttggacgagtgcccgccggcgggcttaccacacggcctggccgttcgtccggctcggctacaaggtgacggagaagcctcagatgggcgagatcaacgtgcgtccgccatgtccctcctggtaaaacggagggtggcctacttactgaccgcttcctgtcatcttcgcgcccagcccggcgtctgggacggtctgagctcagaagaggccaaagaggcctatccggacgagtgggagcgtttcctcaaagacccttacgctcaccgcgcgccccgggccgagtcgtaccacgacctgtctggtgcgtctcccgtctgccgactgcgtcgtctcgcgtgcgcagagctgaccggcttcgggtgcatcatctgcagtccggctcgagagcgtcatctttgagctcgagcgttgtcaggacgacctgctcatcattggccacgcctccgtcatccgttgcttggtgcgtcgcccgcggcttctgggttctgtcgcgctacatcgcgctaatcaactgctctgtacgctgcagctcgcctacctcgtcggcctcccgccgtccgaggtcccgtcggtcgagattgcacgcggcgacctagtcgaggtcgtcccggcctcgtacggcgtcctctcgcgggcgttccacttctggagcgggcccggccgtaaggacggcgagggcatgaacctctacgagaatgtcagtgccttcgcgcgctcgcccgagtttcctcgctgacacttgcactcgcgccactctgctcaggtcgccgagggtacgcagggcaagggcatcactcacaccgaagatatctttgcaggcggccaccaggatatcaatgtcacgcccgaggacaagaagcgcgcgcaggccgagctcgcggcgagcgggcccgaggacgtcagccgggccttcatgcttcaggctgaggcccggcgggggactggcggcttccggagcgcctgaaggggggagcgagtcttgcagctggctcagtctccatttctttgtatctgcatgtggactgcctctccttcgctcgcgtacgtcgaggctgccgacctcatcgagatcggccaggcttgccggcgggggcctccagagaaggtgtcccggtccgggctgagccgggcgtgagccggacgcgagccggaggggcagcagcgaaagagcgacgcgcctgccgacttctcgagaggtgagcctcctcggaggatggcctcagaatatgctgagcagaatcctgagactgctaccggatcatcgacaggtggtgctgccctacacccggaggagagagcgtcatggtgcaaggcaggtcgggctgcggggcccgcttgggagcacccacctctggccgactcccggtccttcctcctctacccttttcgtccccgctccggctctcgcatctcgctctcaaccaccaccaccacccccgccaccctcactctacctctctctctccctcccatcatgttccgctcgataccccgcttcaagcggcccatcctcgccgccgcgaccgccacgacgctcgccgtcggcggagccgccgccttcgccctctcgcccctgctgctcgagacgccgccgccgtccgcgcaggcgtacgagcggccgggcccgctctggtcgccgccgtcgcgcaagcagatgattgacaagctcaaaaagtcgggcaagggcgtcaagatcccgcagtttgcagagaaggaggacgaggagtttgacctgctcatcgtcggcggcggcgcgaccggcgccggcagcgccctcgatgccgccactcgtggcctcaaggtcgccctcgtcgagcgcgacgactttagctcaggtgcgtgcgcctctctctatctctctcctccctttctctctgcttctcaaagggacgaggcgcggcggccttgccgaggaaagggtggtgtcggctgcgccggctcaaggcgcgcgcggatgacgcccgccccggcccggccggagggaagctcaggaaggactttttcagaagaccgcagggctgaccctcttctctcgctcgctctcgcacaggcacgtcgtccaagtcgaccaagctcgtccatggtggcgtccgctaccttcaggtgcgttcgtcttcttcccggtgcccattgccccgccttccgcgccagctcgctccaccgagactttggtttcgtgcggagaaagcagagctaaagtccgattccctctcccttgcccttgctcgtccggtcaacagaaagcgatcttcgaggtgcgcccagccaggctacctcctgccaacgtcggccgcgctgaccttgcatcctcgatccgcgatccgactgaagctcgactatggtgcgttggctgctgcgctcccccctccccccgctactcgcctttccgctgacgtcgctcgtgctgaccggctctccctcacgctttcgcagaccagtacaagctcgttgtcgaggctctccgcgagcgccggattttcctcgagacggccccttacctgtccaagatgctgccgtgagtccttccgtggcggcggcgggtcggaggcccgcgcagcagctataggacgatcaagccgctgacgccctcaccctcctctctctcagcattcttctgcccgtctacacgtggtggcagctgccgtattactatgctggctgcaagatgtacgacatccttgccggcaccgagggcggcaacattggcgcctacatgatgggcaagaccaagacgatcgacagcttcccgatgctgaagcaggacggcctcgtcggcggcgtcgtctactacgacggtcggtcccggtccgtggttgctcgacctgaagcttccgctgacgctgtccctcgctcgcaggccagcacaacgacgcccggatgaacatggcgctcatcctctcggccgtccatcagggcgcaaccgtcgccaactacgtcgccgtcatcgccctcaccaaggacgccaacggcaagctcaacggcgcccggctccgcgacgagatgacgggagaggagtggaatgttaaggccaaggtgcggccgcccgcttctctcgtgctggctgctcggagcaaccgttgctgactgcggtgctgcgcttacctttagggcatcattaacgccaccggaccgttcagcgatggcctccgcaagatggacgacccctcgatttcgaacattgtcgcgccatcgtctggtgtccacatcacgctgccggccttcatgggcccgaaacagatgggcctgctcgaccccgtgcgccggctcttgccttggcttcgcagctcggactgtcgtgctgacttcttctcttctccccgtagaatacttcggacggccgcgttatcttcttcttgccatggcagggcaacgtcattgctggcacgaccgacgctccgaccgacgtcgagcaaaacccggtgccgaaggagactgagatccagtggatcctcgacgaggtccgcaactaccttgcgcccgagatcaagatccgacggggcgacgtcctttctgcctggtcgggcatccggccgctcgtccgtgacccggcggccaaggacacgcagtcgctcgtccggaaccacatgatcaacgtctccgagtcgggcctgatgacgatcgctggcggaaagtggacgacgtaccgggcgatggccgaggagacgatcgacgacgccatcaaggtctttgacctcaaggcggacggaaagtcgaagacggcccacatcaagctcattggctcgcacggctggtcgccgcttatgtttgccaagctcatccagcaggtacgtactcgctcatagggctgaagggacgctctcgcactgacgtcctcttgtttccccctcctttgcagttcggtcttgaccaggaggttgctcagcacctgtcggagaattacggcgaccgggcctggtcgatctgctcgatggccaagccgaccggcctctcgtggccgctgcacggcatcaagctcgcgcccggctaccccgtcatcgaggccgaagtccgctacgcctgccgcttcgagtttgccgtccacgcgaccgacttcatcggccggcgctcgcgcctctcgttccttaacacggacgcgaccattcacgccctcccgcgcgtgctcgagatcatggccgaggagcacaagtgggatgccgctcaggtcgagctcgagtttgcgcgggctatcgactacctccgctcgatgggcatctccgagtgggtccctcattcgccacttctcgtctcgagaaggctgctgctgacccagtctatcctcgtcatgcctcaagggcccgcgcccagaccaagctcgccgacatcccccgggcgcagaccatcatctcgcctgcgcgcaagcccgaggccgaggaggctgccctatactcgcgcgcgctctttactcttcccgagctcgaggccctcaagaagcgcttcacgcggctcgactttgtacgtccttctgcgcacgactgcacgtttggcggcctttcgatcgctgacgcgcttacctcgtgctcgccccttcaggatcaggacgacatgattacgacggccgacctcaagcacgcgctctcgcggctcggctactctgccgtcgatgaggacacgatcggccagatccttcaggaggtcgactttgaccggaagggctcgatcaactttgaagacttcatcgagattgccgccggccttaagggtccgtccgcgagcgtctctgggtgggttcgcctgcgctcgacctggctgaccccaccttctgcttctcgcttcgccccgacgcagagctctcgctccactcggccttctcgcacatcgctatgcaggacgacgcctcgcaggaccacctcgccgccccgatcccgaccctccgctccggcggcggcgtctaaagcctagcagccttccgcctcgctcatccctttccttcctacgttctgaggacgtcggtttgacggcgtctttgacgagcggccgactttgaccttcctacttggtcgactcggcccgacgacacatagactttccctccccctcccgcgcccgcggacgcctttgggccgtgcggcactgtgcttgcacgctgggtcccccgccatgtcagagggattatgctgcaagtattatttgtatggctttcgcaactagactgtctcgatggcaggagaggggcctgggacaaagagttgccgctgcaagcgctttctcttcgggcgagctcgctttattgagggccggtttgaacactcattgaggccggcattacgccaggcttggatgggattgagcctggaatttcagtctcggccgcgcggaggaagagtccggcgcgcgggcggggcccacgacagcacgagcgggactgaccctcttgacactcttgctgctctcaggatcgttggtggtcatgacaggcaggaagaggcggacgacagggcgcagcagcccagcgacctgcgcctcgggacccgcgcgcactacccttccaaagctagccgaccaccctctgatcggatgaccgccaattttcttgatctgggctcgcatcgtcgagagctatcaagcggtaccgatgctgctgtcggactactctttgttcaaccccacccggcgggcccgcctccgcaggcgtcacccactctcccccggtcgattccacctgaaccgcctgatcgacccctcggttaggcggcagattcagaaccgggcgccgtcgtctgcttccagtgggcaaggtttgggctcgatccgacaagatctcgcttcacactttggaaactcccaaatgggacccctttacctggatagtcgtcggtcggaggtacgaaggaagagcagaacggagagggcgagagacgcgcactgggtgatgaacgtgccgcccgttcagcgaaccgctcaacactcccgctgccgccgacgcgttgctcgcaggaccagcagatcagcgtcgggccagggctgcatgctcgacgttcgatgctgcgagggggcgacgtggccggttgcgtcggcggccgtcgacagtaggcgcgtgggctgagactccgcccgcgggcgactcgcacctcctcgctcccgacccccatctcctcctccttcctccgcctcaacatgccgtccgccgcctggctgctcggaatggtcgccaagatccgtcagtcgtcctcctctcgctcctgacgaccagcctcggtgtgcggctagggctgggcggtagagctcgcgtgcccactcgtcgctcgtcgccgccctcttttcatgcccgcccggggagagagccggccgccggcccagcctcgacgcttcccctcgctgggccctcggtgcctcggctttggcctacctcgagagagagcaagcgattgcaggagctgacttgtcttgctgtgctctttgttccgtcggttgcagtcggcagcgtcgccttcctcttcgtcgcctttgccatcggcggcgtctggtttgcccagcacaagatcatctacccgtccgtcccttcctcgccctccttccctccctaacgacattgcaagctgacaacctcttctttgacagctcggcctatcctgagggctcgcgcgagacggtcgccaagcccgacgacaagggctttgacatgccgtacgaggagcatgatctgacggcgccggacggcacaaagctcaaaacgtacctgatgctcgcgcaggagaagcgggtcggcgagcaggtgcgtctcctagcagggtggcactgccgaggcggaagttgcttgtctcatgtcgcgaggcgattgaccggctgacaaccctttccccctcctcgcacctctcccccggctctcatcctgcccggactcttttgctcgcgcttcgtctgacgctagttctacaagcagcgtccgaccgtcctctacttccacgccaatgccggaaacatgggccaccggctccgtccgtccccccccccttctttccttcctttccttcgtcagacagctgacgccaacaccgctcttcctttcgcagccgtcgccaaggtctttgtccacaaccttaagatgaactgccttatgctctcgtaccgcggctacggcctgagcgagggcaagccgagcgagaagggcatcaaggtgcggccctgacgactgctgccctgctgggcctagcgcgcaccgaccgactgacctccttctccatcccgctcgtagaccgacgcccagacggcgctcgacttcctgaccaaccacccggtcctcggaaagggtccgattgtcctctttggccaatcgatcggcggcgcggtcgccatcaacctcgcggccgacaacccgtcggtcccgtgcgcgctcatcctcgaaaacacattcacgacgattgccgatctgctgcctacgctcgcgccgccgcttgcggcgtttacgtggctgcttcatcagaagtgggatagccggacccggttccttgagctgccggccgacctgccgatcctcctcatgtccggccggaaggacgagattgttccgcccaagcacatggacgaggtacggccctcctccggcgcgccttactcagctcttcccccgcttgccaaatcattgacgacgtcttctctgcatgcgcgcctcttgcagctcgcaaagatcgccaacatgcgcgagcacggcaacggaaagccgaacacggtcctcaagaagctccttgagggcaaccacagtgcgtggccgacgtccccctcgctgcgtcctccccgctgcactcccccgcttttcgctgacgcgtctcgtgtgccgcctcgcttcagacgagacggtcgcccagaagggctacttcgagtgcgtcgccccctccgtcttgtatcccgcgttagacccgcaaccaatcaactgacctccttgctcctctctcatccgtcgccgtgctcgcagggaggttatgagtccgtcttctctcccccctgccatcttaggaccatccttggctgacttttgcctggcctcgtctgcccgcctgcagagtttatggagtcgcacattggccggctgccaaagtcgagcatgcagggccgctggcgcggtaagcgtttcgagggcgagaccgattgagcgcgcgcgcgtgcgtgtgcgcgttcggacgcagaagggcggccgcgtcgcctctccctgctctcgctggggcatgaagggaggcacgaaagggctaggatccaagggatctggcaaggaaaaacgaaatgtatcccagtgggcccaaaatatcatgatgtttaccccactctgtcgctgctagcgccctcgcgggtcggggccgttggttggtcgttggtgtttgcggcgtcgagagaagtgggcgtcactggctggctggacgcatggacgcgcgcgcgcgcggtgggctgaagagggaaggcgggttcgtcctcctttctcctgtcctccatcacccttctcccctccttcccgtgtcggcatctggatgtcgccgtcgtcgccctcgacgaaccacggcggcagcatgagcggtgtccaccgtcgccggccgtccctgctcgtgacgacgccgtcgtctatggacgtccctggcctcgcagcagcaagcccttcgcagcagcagcagcagccgagcctgtcgacctcgacctcgctccattcaaattcgtcgggctcgatcgtgctcgctagcagcccacaggcgtacacgccaacgacgccgggcggcggcggaggcggaggcagccagctgacgcctgttggcgcaggaagcggcggcgcacgccgacgaagggcgagcacgaccgagcgttccggagagggcgccggcgtcgtcgtgcccagcctttcgacctcgcccagtagcagtggcggactcgcgaacagagccaagcagcggagcgcacggaggtcgagcggccactcggagcacctctcgagccctcagccctacctcgcaacgctggccgggacgcccgtctcaccctcaccggcagagacggccgagcctccgtcgttgtcgggctcggctggcctactcggctcacccgtcaaccttctcggtctccagcatcagcaggctctcaagccctactttccatcgcccccgccctcgctctctcgcccgcctcctccgccgccgccgcccacgtcggctggccccagcctgcgcacgttgccggcctcatccgctcggccgatcctgcggacaatcgcgtcgacgtcaacggccgtctaccatccgcctttgtcgtcaagccccgtccggggggcggacagcctcgtcccactgagcccgggcagcggctacctgccgtcgcacgccggccggggcgcactctccagcacgacgaccggcggtagcagcacccaggcttcgacaacaacgacgacagcctatgattcagagggcagcacgagctccaaccttccgccttactcgctcacgcccaccggtccgtcctcctcgatccggctgcctgctctcccgtcgctcaagctttctggctcggccggggggtcgacctcgggcggtccgctctctggtttcaacacggcctaccagacggctcagacgtcgccttcgctcgccctgtcgctccagatggagagcgagccggcctatcccggccagtcacactttttcgactcgacgccgtcgtcgcctcggccgtcgacgtcgacctcgggcgaggccgacgagctcgaccggcttcgttcgactgcgctttacacaaaagcttacccgacggcgtcatcgtcggcgtttgagaagctcctgccaacaaaggacgacatgcgcgagacggcgagcgagtggcgccgctggtggaagcgccgcaactcgcgctcgcacggctcgaggtcgtttgccgggagtgtcaatggcaacggcggcggcggtggcggcggggggatcggattcctgagcacgtcgtcggccggcgaccggaagaagcgccgcaagcgggcgggcacgggcgtcggcggggggagcattaacgtcggcgggccgagctggtggcggcggatcaagccgaggcgcaaaaagggctgggtgcgttgtatcgctaccatctttcctatcaccagccgacggctgacgccgcttgacaccccgtctttcggcacgcagctcctcgcagggctccttgtcgtcgtctgtctctggtcgtttgtcgactggatgttttgggtcttcaacccggacaaggtccggatcgagtaccggccgcagtgcgtctcgccgcatccgagctaccacgccctgtcaacgctctcgcccgacacgctccagcggatcgccctcccctctatcggccagccgctccatcctttgctgcctcacccgctgcttgcaccctcgtcggtcgagtcggatgcgctcgcgccggccggcgtctttatcggcgtcttcagcaccgacagcgcgtttgaacgccggatgctcatccggagtacgtgggcgagcggcgatgtctggcgcggtaagcaaggcgagggccttggcagcacgcgcgtccgcttcattctcggcaagccaaaaagcggctgggaggagctcgtccggatcgagatggaaagtgagtcgaccgccgcgtgtcactagtgagcttgagacgctgacctcgcccttgccgccgctagcttacggcgacattgtcatcctcgaggtgcccgaaaacatgaattcgggcaagacgcacgactacttttcctgggcgtccgacaatgcgatggtgccagacgtcgggccgagcggcggggccgagcgcaagcctgactatgtcgtcaagagcgacgacgacagcttcatcatgctcggcgagctcgagaagcgcctgcgggtcctgcgcggccgcaaggtctactggggctgtcagtcgtcgttcgattccgccttgagggacccggacgctgactggtgtgttacctgttgctcgccagacctcatcaagaacctctttatgggcggcgagtgctacgccctctcgctcgacctcgtccactatgtcgcgacctcggctccgatccggcagatcgtccgcggggccgaggacaagctcgtcgcccgctggatgcgcatgcacccggagaaggagacgatcctctgggcctccgagtcgtgctgggtctatgaccatccgcgcgcggggaccgtctacagccacggcttcctgtttccctcgaccgcgcgcgagattcagcaggagctcctcacgctcggcaccagcggcggcggcgcggccaacaacgggcctggcgggcatactgggaaagccgcaaacgggacgacgaccgacaagggtcgtaagcgggccgactcgctctcgtacacgtcggtctcgcaattccggacaaagtaccggccgccactgccaaacctgacgccactccagcgtgtcgaggcgctcgtcgagggctcggaaatgtcgctcctctcaccttactcgtccgtgccagacacgtcgccgctcctgcccgagacggtcatggcccgccgaccgtcgatcaacgaccgctacctcggccaatgggcggctgggcgctggggcgcaggcaccgtcgtcgtccactacgttaaggagcgcgaatggttcctcgagacggccttggcgttcgagcggcttggaggcgggatgggcgacgaggactatccggtgagggaaggaaggaaggtcgagacagtccgtgaggtccagcacgtctctggcgtcgacacaccggaggacaaggagacgctcctcaagcgaagcgccgctaccttcctcccctcgaacgttggaggagaggaggacgaaccgtcggctgccgtcgtcgacaatgcgctgcctgcctgagagcgccccgcccctactacgcaactaattccgcctccttaatcattcttcgcactgtcgcaactatcgcactttaatctctgtactgctcgtcctcgttcaccttgtttctgcatgtgctcgttgctttgacgtgaagtggcggtcggtcgatgagtctctgcgtcgcgtcgcgtggggtcggtcgccgcgcagtcgctcgaaagggggggagcgagctggccttcgtctcctcgcccctcggacaaccacccgcctgccgtcaaactggactcgcacgaccaggtagacctcctccgcctgttgcacacgcacggcagcctccagcagctcgcctgaacacagtgcccgctccggcgctccttttcagcctcccagccgccccttcaccgacctacttgacctctcgcctgctcaaccgctatgccactcagttctaccaacgcctctgcgccctcggacccgatttaccgcgacgagaagaacgacattgtcctccgctcgtccgacaacatctcgttccgctaccgcaagattcacctccagtcgatgagccccgtctttgacacgatgctcaccgacgggcgaggtgagggcgcacggaagaagacgggcgacggcctcgacattgtcaacctcgcagaagactcgagcgagctcgccgcgttccttcggttcatgcacccgcagagcgtcaacccgtcgcttgccgagtttgccgacctcgaacggtgcgtccgggccccttttctgcgcacagggcccctgcttggccgtcctccctctgctctcctcgctcatcctgattccgcttggtcccttcccaactgcaggctctgcgagctcagcgacaagtatcagaccaagtctgtcctccacgccgttcttgcgcaggccgagcggctcctcccgagcgacgcacccgacatccttgccctcgcgctcgtccattttcccgagcgcattggctcggccgccctgcgtgccttcgacggcccgttcgcgaagagcaacagctgcggtgaatggatcgtcacgccaccgcggtacacgattaactcgatgagcgtcgacatgtttgaccggctgccggcgacgacgcaacgccagcttgcgaggctccaggtgtcgatcctcagcccggtcaagggcgggctcaccggctggggacccgtcgctgacaagcttcaggaggtacgtccgacggtcggcgaccgtcttccacgcgtgcgcgtggactgacgctgacaggcacgcattgctggaccctatgcccgcccacgcagaacccgcgcttcctcgaagacgagctcatcctgcccggctggcactgagctcgccgacccgggtcgtctcgctgacgcaccgaagggccaattgtacacagcgttgccagcttcgctcgctcggcctctcctgcggcgacaagcgcgtcctcggtcagtctgcgcggcggctggtctaccggcgctgccctcgcccgaattctatgccctccgtttcctcttcatgaccgttcgtcaccaacgcctatcctctcgatcatcactaggggctcggctgttgcctgagcgaggagggtcactgacgcctgcgctcgcgcggcgtcgcgcccgtcggctcgtcggatctcatatccgtctgctgggacgtcgtcgtcgcatgcgtaagccggcgtgctcagattcgtgccgaacgcctcggcagcctgccactgatattaggtcgtcgtccgctcgagaagagaccagccgaacggacgagccgagtcatgtccaatgcggtgaagacgtgctgagtgctgtttggcgctcgacctgcaagccatgagaatgtgtgcgggtcagtctcggtcgtgggcaacggagcgtcgctcgaaagactcacctcgccgacattgcagctcgccgtgcgtccggcgtgatcctcgacgtcctccgatctgcaaggacgggccagaaagtcagtcgataacattcgctggctaggggcatgatgacgcaccctccatcgcacgcaggtcgcgaggtcgcctctcaacacgcgttcgacgccatcgagcccctgctcgtcgagctcagacagctcgactgcccggcgcttgagctcggcgagcaaacgtagcaactgcccatgcgctgaacagctctcggtccgacctcaagcgcaagagccgcgcgcatctcaagcatgaaagtcgaactgacaacgcaacggccgcttgagcatggtcgaggggcggcgtgtcgacgccagccggctaggcgtagcggaagaattcgaacgcgatccagttggcgataacaaagctgcagtgaagtgcaaaaactaggttggtctgacgtccagtcttgcaccacgggaccaaggcacgcactaagagccgacggggacgagcagcgggacgaggtacttgtagtgctgctcctcggcgacgaggcgggcgagctgcgagcaaggtcgatggacgacggctagtcagctcgcaggactctggcccccggcgtcaggtttagttgagcgaacctgcttgagccagccttcgccgtcctcgaccggtccgacagagatcaggccgccgaagaggtaggccgagctaaggacgagggcgagagccgagcctaggaggaggccgtagctctgaagccggagcttgccagccaccgtcagatgcatgacgagcaacgtgcctccagtcgatgggagctcgaggacctgctctaagcttggccggatcagcgagagaggacagctgtaatgataaagatggccgttgagggttgcgttcgagtcgaggccgagcacccgctcgagccttcttccgcacctgccttaccgccgcttccccatctcccctgcttaagtcagagcgcgcactatgccagacaggacacgacagactcgcgagagctcttgtcgaatggctcaagaggacggggttggtcctcgcttgggctgggcggccggcaacagcgcgcagcaggcccctgtgttgagcactccgggcgagctcgaacgacacccctactcatgacctcgacaccacagcctcttctggttcatcctagctgcgtaggccctggcccgaagattcaggcgaaggcttgtggttgaccgcgccgtgtaccgtcatgacagcagctgctgcagcaagtccagcgccctctatctctgaatgatctcttgcccgcacctcgaggttcggccgtatcatcccttgacgccagagatgagactgacatctcacgtagcatgtaggaacctttcattgaaagcgatatgcacgtgattttcttagacgagaaggccgatatcgtcgttcggagcttcgacgacgtctcgttgcccatccgtcgcgcacacctcgaggcggcgttcgaggtcttcgaagacacgtttctgacctgtggattggagggcacacaggagtgtgacaccaaggactggccatcatagacctttttggaggagaccaacattttgcgtctcctgctgcagctgattcaccctcgcctttgaagacatcttgctgtaagtcgacgccattcgtacatcctaagttcgctgctttgactggatcgtttgttcacaacagccttgtcgaggtctccgaggagtatcagtgtcttcgggcctctgagctgctctaccggcactgtcacgcgcggtgtcgaacgacgacccgggcgtctcccacatgcttggtctcgcgctcctctaccatcccaggggtttagcggcaaaagcacttcactgatgtagagaaagtctcattctgtatcttcgagcgaccgcgaccgacgcccgatctaatggggtagacgtcagcgagcggcggcctccttcacccctccaatctatatcccatccctcgcctgagcgcgcgcgcgtgcaactctagaagcagaagaccttgtcgtcgagcttggagaggaggcgcggggccgggtagccgaggtcgtcgaggtggacccttggggggcgagacggcagcaagggggtcagctggaggcgcttcggcgggggaggacgagtgcaggacagaagataagaggggcaggaactgacttcatggcggtcagcatcggcggcgggccgcacatgaggagcttgttctcgtcggcctcaagcgcagcaccgagcttgtcggcgatgatgtccttgctgacgaagccctggccgccggtccagccggcagggggcttgttgaggacgtggtagacctggaggcggccctcggactgggcgacggcctcgtcgagctcggtgcggaggagaatgtccggctcggtcacgttggcgtagacgagcgagacggtcgtcttgtcggtcgggtcgcgcgcgatcgcccggatgatctggagcataggcgtgatgcccgtcccgcctgcaagcatcgaaatgtgcttgcagaggccgttcgagtagacaaactggcccttggggcccttgaccttgatcgtatcgccgagcttgctctcgccaatgacgcgcgagatgttgccttggtcgtacgacttgatgagcaggtcgaaatggcccttgtcggcgtcggacgaggtcggcgtgtaggaccgcgtgagcgtcttgccggtcgagggaatgtgggcctggatctgaatgtgctggccgatcgggaggccgagcgtgtcggtcggcttggggagcgcgtagcggtagctggaagcgtaagtcaagatcagcctccctctcttcgtcacggtcgagccagagcaccagcggcggcgacgtacatggccgtgttgtggttgatgacgagcttctccttgagcgggaagtcgtaccacgtctggccgtcgagaaccgtccggggggcctcctcacggttaagcagccagatcgtcaagactgagagggcgaaaccgagcaggagggcgccgacagtcggagcgtcgagagcgaaggccatggcgggagggcggaaggggaggagtaaaggaaaaggagggtggtgggacaaagggaaggagggtcggtcgcgtcggaaggggaagacgaggtgtaggctggctggggcgcggaagtcgtcgcgcggcgcgtgggcccgagtgggcctgatggtctgcatcgaagcgatgcgcttgcacaggtcgtcagcccgttttgttctggccgccgagccgcgagggcgagcagtacaagcgtcgtccgtcgcctcgtctgcactgcaccaccctccttcctctctcactcctcctagacagcatggcagccctcgtctccatggccaaggccatctcggccaacacgccctcgcccgcagccctcctctcaaacgcgacgactgccgtcaagggcgccgttgccgccgcgacgccgacgacaaaggacggcatcccggccgagcttcgcaaggggctcgacgtcgaggcccaggaggcggtcgagagcgtcgaggttgacggcatggtgcgtccacttcgcatctggcgctcgttagcgggaagagtgaggcagacggcgtcatcggggggacagctcgcatccctcggcgggcagcagcggcatgcgctcagctctcacctgcttctggaacgacggccgatggtcgcccagccgccaggtctgaccgctccgcgccttgcacggctgggcaccagaccggctggatacctgggcccgcgccctgctgtggcgttggagcgccaatggggtcgtgaggccggtttagctcgtcgcacaagggggcacttgccacggggtcggggaggtcgttgttgggcatgcgctcaggccagagcctgctcggtgtcttcgacgcctgcttgctgacccgcactccatgctctccctcccctcccctctccaggtcctcatcaagatcctgaagcacttcatcgactcgccctcgtccgagacgtctggccagctgctcggccttgacctcaacggcacgctcgagatcgcagacgcctttgcgttcccccagctgccgcagagcgagcgcggggccgacgaggagaaggagcgggcggccggtcgggctgctagtacgtcctcgcgcttgtgctttcggcgatggactgcagcgacggcggcgcctcaaatggtgtcgccctctcgctcgatcactcgtcttaacgctgaccgccctctctttgcgcgtcgacagaccaggcatacgcgagcgagatgctcaagtcgctccggcagacgtcgatggtcgactcgcccgtcggcgcctactttacctcgccgaccggcgccttcttcaagaatgcgctcgttgaggctctctcagtctaccaggccatcggcggccggaagggcgtcgtcctgctgcatggtgcgtccccgccgtcaacccgacttaatggcaagtccgccctgtcgcaggtgctgatcctgaccctgcccctcccgcgctcgcagacccgtcaaagagcgcccagggcagcgtcagcattcgggccttccgtttctcggccgcattcggcgatgcccttgcccggggcggtgcgctcgacacgcagacgctggtcgactaccgcctgacgttttccaacctgctcgaggagctcccgctgcgcatcaccaactcggccctcgtcgctgccttcctctcgaccgtcggcctcccctcgacctcttcccggtcgacgacctcgtccgcgggttcgagcacgctcgatgagctcgcccacccgcttctccccgcggcccacctcccgcccctagccctcagcttcccctcaagcctgacgacctcgctcgagcggacgacgcgcgcgctcgatgacttccagcgcgaggccaacgccctctcgttcaacgcgcgtgacatcgcgcggcaccaggcgagggtcgacgggctcgtcgcgacgggtgtcagcgaggaggacgcccggcggcaggtcaaggtcccgaaggagcaggcgaggacccagagcctgatgctccttcgccaggtcgaggagtgcgcgaagggcatgagcgccgagtcgggcgcgggtgtcgccaagatgtacgccgtcgccaagtagggcgactcgacgacgacgacgatgacgaggtgtcgtgcagagggccggcgccggtaggaggggctgcgatggagggagcccactttttctcattcaaaaatggcatgactactgccagctcaatctgcaagaggagagcatgcgatagggacgaagacggcccttcaggttctgccaaacggcgagcatgggaaggagttgttgctgtgccagacagtcgtcggttgagcccggagcttgttcgaagcctgcgaccgaccgaccgccatctccatctccccctccttcttgctccctctcgcctcaggcagtgcatgctagctcgccctcccctcatcttcagcacccccgttcccgccagacctcgttccgtctttggcctcgtcgcccgcatccagtcagctccgctcctcgttcgccggctctctgcctatcgaccagcatccttccgcccggccacgacagcccctccccccaccatgccatcctcctcctcctcgcgcccgatcgtcccggccaacttcaagcccttcacgctcggcatgatccagctcggcgagatcgggcccaacaagcttgccaacctcgcccatgcgcggtcgatggtccggcgtgctgcggagggcgacggcgcgggcgaacggggcaaggcgcaggtcgtcatgctgccggtccgtctcctacccacctggcgccggattctgggaggcgagctgatccgaagctgaggcggtcgtaggagatcttcaactcgccgacggtcaaggcggcgtacaagcccaatgccgagccgatccctgagccgacgcccgacgcgcccatccggcccgagcagctcccgtcaaagaacgaggcgccgacgctgcatgtccgttgactcacaagttgccgtgtatgtcagaggtcaaggctggcatgctgaccttttcgaggggaaacagatgctctccgaaacggcacgcgagacgggcgtttggctcattggcggctcgatcccagagtgtcgggcgggcgaggtcaagatatggaatacggcgaccgtctgggacccggcgggtgagcagggcaaggatctgcgatgcccccctgtcacttcagtagagctgacgagcaggcatctctcaggcaaccttgtggccaagcaccagaaagttcacttgtacgactgcgactttcctggcggcgtccgcttcaaggtgcgatcgctcgcgagattcgtggttgccgtctctggtcgctgctgatgagacgtggttgtccctggccatcaggagtccgacagcatgagtgccggtaccaagacgacgacgttcacgacgcgtgctgcccttccctccctacccaactcacacggcctgccgtcctgaccaaacctcctccttggcagcctatggcacgattgcactcggcatctgcttcgacatacgttttggcccgatgctgacggcgatgctcgcccgtgagcccgaaatctgcgcgtacctcctgccatcggcgttcaacatgagctcgggcccgcgcgactgggagctcctccagcggtgcagggcggtcgattgccagatttacgtcgggatgtgctcgcccgcgagggacacgtcagttgacgtacggcccttccttctgcagccggatcgcactcgctcgactgctgaggagctgactctgtgaccgactccccccccctttctcgtggctctcgccccgccgacagtacgtctcgtacggtcacacgctgatggcctcgccctcgggcgaggtcatctcgagcccgacgccagaggacgagggcgaggcgatcgtctttgcgaggctcgagccggaagcgatgcgcgcggcgaggcaggctctgccgctttggtgcagcgcgaggccggaggtgtacggtcaatgagcaggggggtcatcgcaggcgggtgttgacacacatgaagtcgagtactgtcgtagcacgaggccaggcgagcaggtggctgaccgtgccttttgtggctgggtcgacgacggcttcggggagtcgctcgtccgcaagcgctagtggcgggctgtcggttaagtggagaaggtctcgacttctgactcgaacggcgacagtcgtcagccacgacgttagcttggtcaggaggaggggctggttcgggcgggtttgcctggcggtcttctcgtaatgaggaagatgaacaggcaggcgtgcagcggcgagagagaccaggagatgtgcaggttgagcgacaggcggagagcagtacagcaggttgccttctgccagccctcgccccgccgcctcgaggtcgttgccagcctgtcctcccgtctgcttggggaaggttagcgaccagctccgtagaaacagcaagggggcgggacacttactcgtgcagttggccgcaaagtggccttgctcgccgcacttccggcagccgtttccgccgttcggctggaaaaagacgtcctcgcgtaggaccttgaagtgaggctcgtgcgtcgcgagtgcgagcatgattagatcggcatcgagcccgtaaatgacgtgccgggtgtttgggtcgtggccctcgttgacgcgctggcggcggataaagtccataatcttgtgctcgccctcgccggggaccgaggcgtcagagatgatgacctccatctcggcccaggcggcgtcagtgttcatcttctggacgacccagtagcggagcgaggccgcgaggaggtccatgaagggcgtgcctgagacgggaagggggtcagcatgcgcgcgcgacaggcccgcgggaggttgcagcgaaagggcggacgcaccgggcgtgatggcgttcgagtcccaggcctgcttgtttttggtctcctccgagacgggatggcccattgccgccatcatggcaatgctctcctccttctcgcgctttgcgtccgccgcctcctgcgccgcccggaagcgacgcgagcgctgctggttcatcttggctcgcggggcgacgccgtcgatcgccatgaagaggagcttgcgcggccggaccatggcaacgacacgctcggtgtacgagaagatctcgagcatcatgtcctcctcggtctcgggtgcgggctggcagggcagttgcgggtggggtgtcagtgagaggggggagcggcgcaagtggccagccagctgagacggaccttgccctccggatgcgtgcacgggtggacgatgccgttcatctgtgcagaacgacgggtcaaggccgagacaagatcagcttcgacagctggagggcgcgacagccgggagcaggaggcggctgggcggtagagcgcagcccgcaccctctccctcgccagccccgtttcaagccttgcgacgtacgtcgagataaaggttgtcaaactcctcgccgttcgggttcttggccgagatgtcgaccgggatgacgacgtcgtcctcgccctcgccagccgggatccgctgcgggtcgtcctcctcgacgcgcgagatgatcttggggtactttctgccggtggcgcgcggcgcaagacattgagagagtcaggaagggtgcatgcaggctgccctcgcagcctcagagtgaatgctgctgctgctgctgctgctgctgctgcttgctctggtggccgagcctcgtgagagccggggaagggagctcgagcaggacgcactttgagagccatcggaagagggcggggacaccctgggacgccgcgagagaagcagaaatgttgacgtcagcacctgattgcctgcgagctgtcggcaggacggaccatgctgggctggctttgaagaggagaagagagggtgagggagagcgagagtagcaggcagcgagagctcgaggtggcaattggccggcgaggtcgagcccggcaaccttacatcggacctgccaagggtgcattgaggttaagccctgcgcgcgcggactccgccttcctgagctcgacaaccgcctcacccagcgacagcagcagcagcaaggccagaccagcagggaaacgccagcagcccgagcgctctccccaaggccttcttcctcgaccccggcctcattcgcccgtctcgacttctctcccgagcgtccgacccgcgcgcgcgcgccccctcccctttcgcgctcgcccgcccgccctcgctcgctatgggcaagtcgaacgtcctccaggacgcgcccaagcgtatcaagcagcttcaattctctgtcttctcgccccaggaggtcgtccagctcgccgaatttgaggtcacccaccgcgacctctatgtcgccggcgagggcgggctcggcaagacgccggcgccgggcggcctactcgaccggcggctcgtgagtcttgcgcgtgcgctgaaaggaagacgaggtggagggctcggcaggtgctctcgttgatgcccaaagagggagcaagatggcgcggccgagctctatgcttgctcagtgagggcgtccgctcgaagctccgcgagccaagcggccgtcggggatggctcgggcgcactccctttcgtcgaagcacgctgccctcactatctcaggtccagctcattgacgctgcttcctcctcctccctggccctcactcgcagggtgtctccgacaagcagtccaactgcgaaacgtgccaccagaagatggccgactgcgtcggccactatgcctacatcaagctcgtcctccccgtctttcacattggctacttcaaacagacgatcacgatgcttcaggacatctgcaaggtgcatctctctctgtcgctgcgagagcgttgaaccggccaaaacacctgccctctggcccagatgatccgcctgccctgcgacggccgctgaccgaacccctttctccgcagacgtgcgctcacgtcctgctctcggaggaggaccgccgactctacctctcgcgcttccgtcggccgaacctcgagaacctccagcgccagtcagcctccaaagccgtcaacacgctctgccgcaaggttgtccactgcccgcactgcggcgcgaccaacggcaccgtcaagaagattggcgccctcaagatcgttcacgagaagtaccgcgcaaaaaaggtcgccggcgagcacgaagaatttctcaagacgtttggcaacgccgtcagggaggacgctggtctgcggcagcacgtccgcaaggcccaggaggacctcaacccgctccgcgtccttgagctcttcaagcgcatttcggccgaggtcggttccgctctctgtacctgtgccatttgctagctctgacgtcctttttgtcgccgctgtcgcaggactgcgagctgcttggccttcaccctgacttcggccggccagaggagtacatctggcagtacatctcggtcccgccagtctgcatccggccctcagtcgcccaggacggcgcgacgtgcgtgtcctatctctcctaccctcgcgcccgacgagatgcgcggcccacgtcgctgacactgcccccttcttgcttatggctgacgctggcgcagcaacgaggacgacctgacggtcaagctcggcgagatcgtctttgccaactcgctcatcaaggccggcctcgccaagggcgtcacgactgccaacctgattgtacgtgcccgcaaaccgcctgcgcagcgaggtgcccgaccttctgttaaccctcaccctccatttgaacgccccttctgcaggagtactgggacttcctccagctgagtattgccatgtacatcaactctgagatgccgggcatcccgccgatggccaatcacaagccgatccgaggcttctgccagcggctcaagggcaagcagggccgctttcggggcaacctctctggcaagcgcgttgacttttccggccggaccgtcatctcgcccgaccccaacctccggatcgacgagctcgccgtgcccgaaaagattgcaaagaagctgacgtacccggcgcgggtaacggcccacaacgtcgacggcctccgcaaggcgatcgagaatggctgcgacgtctggcccggcgccaactttgtccaggacggaagctcgaaggacggcttcaagaggtacctcaagtttggcgaccgcaagggcatcgccgagcggctccggatcggcgacattgtcgagcgccacctgattgacggcgagtgagtgcacacgggctggcggatgctcctatcaagcgaggcggactgaccccccccccccctttgcttgcgcccagcctcgtcctcttcaaccgccagccgtcgctccacaagctgtcgatcatgtgccaccgcgtcaaggtccggccgtggaagacgctccgcttcaacgagtgtgtctgcaacccgtacaagtgagttcctcgcttcccgaccggctcgactattcacgcttgcgctgacctaccgcccttcgaccgcgcccagcgccgattttgacggcgacgagatgaacctgcacgtcccgcagacggaggagtcgcggaccgaggcgctcgaactcatgtcgaccaagaagaacatggtcaccccgcggaacggcgagccgatcattgccgccatccaggactttatcacggcggcctacctgctctcgcgcaaggacaagttttacgaccgccagcagttttgccagatttgctcgttcctcgccgacgccaacctccaggtcgacctgccgccgccgaccgtctggaagccggtccggctctggaccggcaagcaggtgttcaacgtcctgatgaagccgacgcgcgactcgcccatcaacgtcaacctcgaggcaaagtgccggacgctcgaggcgccggcgaagggctcgggctttccgctcgacatgtcgccgaacgacggctaccttgtcatccgcaacagcgaaattatgtgcggcgtcatggacaaggcgaccgtcggcgacggaaaaaagaactcggtcttcggcgtcatcctccgcgattatggctcggacgaggcggcggttgcgatgaatcggctcgccaagctctgcgcgcgctggctcgccaacgtcggcttctcgctcggcatcaacgacgtcatcccgggcccgctcctgctcgcccaaaagaccgagctgatccagcagtcgtacgacgtctgcgccgacctgatcgaccaagccaagcggggcgttctcaagaacgcgcccggctcggaccaggcggggacgctcgagatgaagctctcgggcgagctctcgggcgtccgtgccgcttgcggagagctctgcatggccgaactttcgcgccacaacgcgcccgcgacgatggccacttgcggctcgaagggtaaggccggccgggccctctcctcccctctgaactgcccgctgacgccctctcctctctgctcgcgcaggctccaagctaaacgtcgcgcagatggtcgccgtcgtcggccagcagattattgccggctcgcgtgtcgtcgacggcttccaggaccgcttcctcccgcacttccgcaagaaggcgcgcgagccgccagcaaaaggcttcgtcgccaattcgttcttctcgggcctgagcccgacagagttcctcgcccacgccatgtcgggccgcgagggtctcgttgacacggccgtcaagacggccgagaccggctacatggcccggcgactgatgaaggtcggtccccgctcacccctcgctcccgaacgaacgaccgtgtctgacgtcaatcgctctcctctgtgtccaggcgctcgaggacctgtcgacgcgctacgacgactcggtccgcaattctgagggcaaggtcgtccagttcaagtacggcgacgacggccttgacccggcctgccttgagggcgagtcgagcccggtggccttcccgcgctcgtggacgcacgccaagggcattgccaacgctggcggccgctcactcctgccctgggaggtcaaggacatcctcaaccaggcgctcgattcggacgacttcaagcgcaattgcgagccagagtacctcaactcggtcgaggactttgtcgtcgacaagattgtccagccgatgatcgccacccgccagaagtacggcctctatccggccgacgagtttgaggaggagaccgagggtatggacctcgacattggcgccgaccgtaagtccctctgcctgcgtcgcctcgctccttcagtctcgcgctgaccagcagcgacatccactccctcgcagccgagacgcggacggccgtcgccaacctgtgcatggttaccgaccaccacctcaacaagttcctcgagatctgctacgtccgctacctgcgcgccaagatagagcccggtacggctgttcctcttcaattcgtgcgcccttttcgctgacccgtccttctctcatccgattaggatcgaccgtcggcgccgtcggcgctcagtcgattggagagcccggaacccagatggtgcgtggcgcctgtgctgagctagaggatggattgagctgaccaccgctacgctttgcccgtcaacagaccctcaagacgttcgtcgaccgctatccgtccgccctcgagcatcacgctgacgcccttcttgcgctcctccaccctcagcttccatttcgccggtatcgccgccatgagcatcactctcggtgtcccgcgtatcaaggagatcatcaacgccgccaagatcatctcgacgccgatcattgccgcgacgctgactaacccgcaccaggagtcggccgcgcggatcgtcaagggccggctcgaaaagacgtacctcaaggacgtcaccaaggtcattgaagaggcctggggccagctctactcttacattggcatccatatcgacatggactgcgtctaccagctcggcgtgtgtctcctctccctctcgccgagccctctcgaacggatcctgacgcttgctttccgccctgcagctcgagctcaccctcgacgagatcaagtgggcgatcgtcaaccacaagaagctcaagatcaaggccgaggtgcgccccctcttccccttacgcgcgtgtctcgaggcggccctggtgctgacgacgtggcctctgcctttctcagaaaatcaacatcatcccgcacagcaaccgcatccggatctacgtcgacgacgaagagaaccgctacttccggctgcggacgatcaagcgcgagctcggcaacattgttgtcaagggcatcccaaccgtctcacgggccgtcatcagcaaaaaggcagacgacccaaagcaaaactcgctatttgtcgagggctacggcctgcgcgaggtgatgaactgcgagggcgtcatcgggaccaagacgacgaccaaccacgtgcgtcgccccatcgcatcctgaagcgcgttcccggagctgacctctatctaacgcagatcatggagaccgccgtcgtcctcggcatcgaggccgcccggagcaccatcatcaagcagattgacgacacgatgagctcgcacggcctcggcgtcgacccacgccacaccggtctgctcggcgacgtcatgacgtacaaagtgcggcgggcctcgtgcgagttgttgagattgcccaggcggctgaccgtgtcctctctcacgactcagggcgaggtcctcggcatcactcgcttcggtgtctctaagatgaaggactcggtcctcatgctggcttcgtttgagaagacgaccgaccacctggtgcgtctttgctcgttgtagctgccgccctctcgccagcgctgacactagccccttctttccctgcccagttcgacgccgcgctctttgccaagaaggacgcgatccagggcgtctccgagtcgatcatcatgggtcagccggccgagcagctcggcacctcgatgtacgtcgaaactcgcgcctcgccgctgaagggtcgcatgctgacctcctcctcttcccctcaggcccgccctcgtcgtccccgcgccacgcctgccgccgcaaaaaatcaaagagttcgaggacactttcccgaaaaagaagcggcgccatgcggccgcttgaacgacccctctccctctcgctgtcacgcctttgcccttctcacattcacttgacgaccccccaccaccttcatgaccatgtcactgtacacaatggcctgccagctgactgaacgtcgcctgtctgttgaggaaggtcgagcgggttgcagccttcaggctgagtcgaggcgggtgccagggtgtaggcggccggtctagcgcagaaggcgagagccggtcatcaaggcagacagaatcattcgagaagggagacgagccaaggagcgtggttgaggtctggggtggaatatggcagagcgagcagaagaggaaggtcggagatacaatcagggtgagaggattcagaggcggcggcggcgacggcgaagaagcaagaggcgctccgctcatttcctgatcgcggcgtcctcgcctgctgtgccagcacagaggacgaggccttgttgtctgtctgtctgatgactagggcagagcggtcagccgtgacgatcggaggtcagcacgcagacgaactaaaacatcggggcaggagtaggcgcacctagaagtttggcttcacggcctgaacaaagacagcgttgtcggcacccgaagacgaaggagtgagcgagagcagatagttggtgtcgaagcttccggcagaccacgcaacaaagccgtcgatgttggacgaccccttgacgtaggcgagctcagctttcaagttggcgatgcagttcgcattgttgggggcgcccgtctcggtgacaagtgcgtgcctagcggcgacaaagggcaaagcaaagagccagcagtcggtcagcaacggcgtcggtcatcgaccccgaaggcggtccctcaggcagccagagtgacgcaccggccgttgcttttgagccaagtgttgagggcagtgaacgactggacgttgttcgtcgtgcagcttccctgggtgccgctgttgtccgagtcaagataggctgttttcaggacacggacaggcaagaagtcagcatcatgcaggccttcggcttgactcaagtggaccgaccgtggatgtcaaagatgagcttgtcggtccctccggccgggtccttgacgttaagaagcgccgggccgctccgcgccaccatctcgccggcatgcgtgtactcgctccccggaagcaggatgtgctgggtggtcgcgccggccgcccggatggcgttaacagcggcctgaacgctcgtcgcccactgctggacgttgaggtcgtgcggctcgttcatcaggccaaagatgaccttggcgtttgacttgtacttggtcgcgaggatgctccagatggaggcgaactgcgaggggcgcgaggaaggaatgcgtcagcggaacggttctcctgctcttggttctgaagcgactgacctgagcgttggtcgggccgccttggccgacaattcccccgttccacctagcgtagttgtgaaggtccaaaatcacccactgacccttgctgagtccctgctgaacgagggcgtcgagcgtcttggcaaagttcgcatcgagggcgcccccgagctgcggcgtcgcagcctgccatccgaagggcaggcgacagacattggcgcccgctgtcgcaaagtgatcgacctgagagatcggagggggaacgttgcctccagactggccgccgttggtgtcgatgccaaagtcgaggccggcgaggttgacgccgtggagcttaggaagagttgccgagacgagcgaggtcgcggcgagagcgccgacaaggagctgggcgacggtcatggtggttggagttgggctggagatgatgggttggtggggaagaaggagggaacaggccggctggcgaagcctccttttaagccctgcacgtcaaggagctagccgcccgaggcatgtttttagaccggcggtcagcggcatctccatcgccgatgacgactggtcatcaggagggccagtcgaggaaagcagggtccaaggggtgtgaagcccggcccctttcgtgaagtccattcgagcggcgagggctcaaatccccctcttctcgcaggcaggcggcggcgaaacagccagcgccagaggacacagcgacaggcccttctcgggagagcaggacgaccttgctcgaggaccgtgcttgcggcaatggcgagagcggcagcggcgacgaagagccgcagtgcttgccgacgacggcatattgggtccgtttggtcgcggacgggcttcgccctgcgagaagcccctttctcggccacaagagacacgatcgacggccggttggcccacgcgaaaccgaggctcgttctctcgagctagcgaagagaggaccccctgcccgaagaatgtccgactgttaaacctaatcacatcgcgccctcagccatcggccagcagccgctccaccgcgcggtcccgctcgaagtcgctggaagtgggcacgggcaggcgtcagtaggaggcgcgccaggagggccgcaaaaaaaggcgtgtcgacgcacctctcggtcagagcgcgaactatgttggtccgcccagcgtccgggaacatagccgagaggctagcgacgagcgaagtcgtttcagtttgggttcagaccagtcgacgagagccaagagacgtacgcggcgatgtcctcctctgaggccactcttgctggtgcgcttgccccgaccggagctaccgatgcagacaggacggagacccattgcgacatgaccgatggttgggtctcctggccggttggcggtcctgctggcggccgaggagccagcacggtcgccgttgttgtagtcgccgttggcgttgccgctgctgttgtcgtcgtcgtcccgctcgccgcagcagtcgtcgccgcgacacgccgcctcaatccctcgacgacaggccggcgtcgggcgtcctcctgaggctcgcgctctggccaggcgtccgagctccgtgccggcgcccgggcttttggcaggagcggcagcaggacgcgctcggctgcccgcgagacgggcgtcggcaagaggtaggagccgaggagagggtgtgagaggattaggtgcgtcgagagggcggcgatgagagcagggacaggagccgagcaggccagctgagaggagggagggagcgtcagcccggccggcgaggcgcagtcgagggtccaggtgtagatggcctacgcacgacgaccccaaggacggccggatacagcttgtcgccgagctgaacaccggcgatctcaattgtgtagagccctggcgtgcacgcccaccacttgccgacgacggcagcgacgagaacccaaggcccggcctcgagcgcgttgcggccggtcgcgccgtgccagctcgcgaggacgagcagcgacagcaggcggtcgacgccgagggctaggacgaggtacgaggcaaacttgcgcgacccgagcagccgttcggcgcgccgggccgtgtagtagacgagcaggaggtagagcaggagcgtcgacgagtcgagcgcgatcaagcaagaggtgaggatccgatactgccaaagccacacagcgcccagtcagctcgtgcaactgacaggagccacgagcgcgcgagcagcgcaccagctgaagatgctcggtcaggtgcggcttgaagaggagcggcacccagggcttgacgtcgagcagggcggcgagcaggctggccgccgggacggtgagcatcaggccgagcgagaccggcgcatgctgaaagcctgtgagggaacagcattcagtcggatgaggaccctgttggtgcgagcgtcccttccttgcgatgactaacccgacatccttctggcagggcttggatggcgggagagattgaggtcggaagggagagtgagacgagcttcgaagggcacgcgagctgctcggacggacggcgccggctcccggcagccaaggacgacaggaagccagtcttccctccggcagcttagaatgtcagcaacttgctgagccgactagggtgcgtctcagagacctcatcgtatcctcccatgactaatcctggtaagcgaaggagaggcaggcacagtccaggtcgagccggccggcccgccttcggcccgtagccagtagccgtcccgaaccggaccatcgaggcagcccatctctaaacggtcggcctgggaggagttgcgaccctgactttcaccttctactccattttctacagcaccagcagcaaccatgggcatcgctacgaccgacgacctgatcacgctctcgcacgaggtctgtcccgaccacgactgctgctgctgcgcctcactgccagctctccttccgacgcctgctgacccgagcctgcacccctcgacagggctcgtccgccgagatctagtgagcgtcgaggggcatatccgagagcgacctgagccgagatctgaccagccgggagcattctcaaagcttctacggcgcccacgtctcgagctggaaatcgccgagcgcgagcggcggcttggtcgaggagcgcttcttcatgagcaagagtgcgttctccttctcgtccgcagggatgcggctttctctcaagctaacgctcgcatgactgctgctctctctctttctgccagctgcggtccttgatggctctggtcctgtgcgtctcggtcgaccctctgcgccctcggcgtaccgaggctgaccccctttctgcgcccgcccctgtcattccatcgcattcagatccgaggcggcatccctatcgctttccccatctttgcgaccgacaagcacccagactatcccgagctcggcggcgcgcatggtttcgcgcgcatcagccgctggtcgctcgcctcgcaggtcgaggacaacgagaagacgacggtcgtcctgagtgcgtagacgttcgacggcggccccatctcgacccaagactgacatgcccctgccagccctcgagtcgaacgacaagattgctgcgctctttgacaaggccttccggctcgagtacacggtctcgctctccaagacggcgctcgacacccacctcaagatcaccaacctcgctgacggcaagtttcggttcaacacgtgcctccacacctgtgcgtcgtcgccgaaaaaacacaattcgctgcttcacccagacctctgacaagtctctcgacgcttgctcagactacctcctgccagagggctcgaccctggccgacgtgaccgtctcgccgctcgacagcctgcgctacacgagccgcctcgacccggcctcgccgcacgacctcgtctcgccgaaggccgtctcgttgaccgaggagacggcccggtgctaccacctgccagccgacggaaccgcgaccgaggtctttgttgactatggcgcgaaacgcgccggccagggcgtccgtgttgtcacgagcggcggctgggaagacagcgtgctctggaacccggcggccaaggcgggtggggcgattggcgacctgcacgagggcggctggcgcgactttgtctgctgggagccgggagtcatccaggagcttcgctggcttggcccgggcgagacgtggcagggccggcagctcatgacggcggtgtgattcgctactctcctgcacccaaacccccttctctgtgatggcctctgtcgctcactctgggcaaggcgacatggctataggcctgtcgcctcctgaccgagcatctccttgatatgccggacgagattctccaagctcgcggcaagatgcaggtcgcgagtcgtcaggccttggggcgggaccggaggccggagcgggtcaggcagcgagccgagcggcgtggccgggtagaacgtcttgtgcgagatgatgcggatccggatcacctcgcggttggacctgatctcggcgtggtgctggtcaagagggggggaagaggtcgtcagcggggcgtcgctcgaagcccgagacgaaggagaaggaccaacgttgtgcagatcctggatggccgacgcccagcgcgggaagagcgtgcccatcaccgtcgggctccagtcgccgagccgctcaaagtgctcgcgctcaaagatgccctcgacaaactcgtcgcgcggaatctcgcggacgagatacgtccgctcgacgccgtcctcgagaaacgtcttttccgaccaacgcccgccggcgtagagcggctggaagacggcaatcgcgtgccggaacgactcgtcggtcaggaccgaggttgctggcgggaaggctgctggacggaactgctggaggcgctcggccggcgcgcccaagcggaggaagtgcggcgcccgagagggttgcggctgggcgaccggcgcgggcgatcttgacgagctgacgctcgagctcggcgtcgagcctgactgttgagctttcggcgagggggccgcgggcgaggcgtgttccgacggctcggctgacggcaagatgtcatacttgaggccggacggcgtgacgaagctcgagacgggcgagctgtccggccccggcgccttgagctcggcctggacgtcctccatcgcctgtttgagtgccttgcggtaggcttctggctcgccgctcggccggattgtcacctcggcgccgtcgagcaacgccgtcccttgctcgagcgccttctcgcacgcggacggcttctcaaacgtcacgtagccgtggtggacgcccttccactgcttaggcggcgggatcgaaatgtagtagactcggccgaaattaagctcgacaaacgtcttgagccggtgttcgctcacgtcgggactgaaacctcggatcatgatgctccgaccgggcggccgctcgcgctctccggggagagtcggcggcggcgtaggccggacgtacggcggcgagatggctgcgagctttgcgcgcttcgcgaccttcttcttggcagttggcccgagcttctcctttggcggcggaggaggccgcttggctgggtggtcgagcgtcgcgtagatcggagtgacgaacgacgacccggtcgcagtcgagcctaaagagacctctggtcgaaccgacgcccggcgctctcctccagccgagcttgaagaggacgcttgagcagaagaccatgcaggagaagcgcgatgcgtcgaggaccgaaagccagcaggcggcgctgctccgcccccggcggtcttctgctgacgagctgctggcgccgacgaggggccggcgggctgcttcgaccggaaggaggaggaggaggaggaggaggaggagaaggacgaaggagcagcctgctgcgaggagcgcttcgacgacggctggtgctggtgctggtgctggtgctgctgctgctttgaagcattggcacggtcggccgtcgacgctgcctgcggccggtcggccttcggcgcggcccgcggctcgtcctccgttgtcaagcggaagacgtcaggcagcgcacggacgggccttcgtctgctcagagagccgctgacaggaggagcagcagttggcggagtcgagctgggcccgctggaggaggcagagggcgaagcggcggcggcggcggcggcggcagagggcggcggcttcgctgagggtggtccatcggctgctgacgatgcggccggcgatggtgcctgctcgcggaaggcctgagagacgaagagcgctgttgccagacagacgagcgaaggcgcaacaaggtcagcccgatcgaacgcttgagagcaagggcgcagggacgcaggacgaccggacctcgtcgaccaccgccaacgacgagcgacctacccgccgacgagccgaggctcctccggccgaggaggcaaagctgcatcgcgcgctgcaggtcgtctaaaggggcctgctgtctgtcgaggagcctggcgtggggtctgtctgaggtagagggaggggagaaagcgaggcgagggcgttgctggtcggtgagtgggcaaagggccgatcgtcgaaagctccgccgttctcgcgcatcaagtgacgcttcgatcagcttactcgacttgtccacccttgactggcctctcgcacgacgacctgacgggactgcagcgtagggctttcgtttgtcatctaagcaagccaacggaacgaccggttggaatctcgcggcaactcttccggcctgcgagcaggcgcgcgccgccctgggtcgacgagcaagagcaaggaaggaagggtgttcattagagacatcagggtccaggaaaaacaaaggcaggcgcgtcgaggtgggcgcgcaggccgcctctgtcgcctagaccggaaccgacctgcttgtcctcacccgccgaccatcagccctccttgcctggagagagacaccattttaacggtctgtcaggtgagtaagattgctcacgagcggcgaggtagccgccgaccaagtaaacgctgacagctcctcgttcttagcgcctgtccttcccttgttcgttgcctctggcggtcgacctgtcttcagcccactcgacccttgtcgaagcctgcttttgctcctcaagtagctcaaacagctgaagtcctcgcatacctagcttgcatcctcggcactccccctatctcgccaggtcacctttgcagctatcagacactcgagtcgcagcagtcaggcccggtcgacggcgcatggtcctcctcccgtagcgccaccctcttccctcgtccagcgacccaatcgaccgcctccgccgcgatgcctttcacggcgcagtctgccggcaagctatcgctgtctcccgaaccgacggccggccatcgaccgtccgccggctcgctcgacgacttgccgtcaccgccgtcggtcctgccaggcttgccaagctcgtccggcagcagccttcctccatcgccccccttggccaacaggcagccgtcatctctcctcctcagcgcagttcagcaaagtcgagacctgccggcgctccctccctcctcgagcgcctcatcggtccggtcaatggcgaaccggcggccctcggcttcgacgcctcccgtctgcgacccggcggcggcgcagtcgtcaactcgccggccgccggctgtcggcggtgacggcctcctctcgccgctcgccggccacgtctaccatcctcgcgcaccttcgccatcgcgttcagtctcctcacccgcgccctccgtgcggcaggcgcatggcggcggcggaaccggtctcgcagccgcgctcggcagcgtcctcaagccgaaggccaagtgggcgcgcggcctgactcgccgagggtcaagcagcgcgatgagcgtcctcggaggcagcagtccgacgacgcttgcaggcgcctcggcctcgacgccgactctcttgctcaccggcactgcgcgggccgaaagcggcggcagcggagggccttccgatgcacagtatgcgacccccgcatcacctcttcgacctacgacgacgttcggctcaacggacggcagccgctcatcaacctcgcctttcattaacacggcttcaagcccgtcaccttttggccggccaccgcccaggtcggccccaccaggctcaacctcctcgccctctaccttcgccgcccgcaagccctcggccacaagcacacgcgaaccgcccctcgaacgcaagccttcgcgcctcttcttttcgctccgcaagagcacggcccctcgccggccatcggcagcctcaatcttcggtggctcgcctgggggtccggcttcgacgtcgtcgactgcggcggtcgatcgcgagatggacgttggctcgcccttcaactgccagcacggtgcgtccggcctcgaccgaggctatcgaagccgccttctacgatactgattcgccatttcggacccctcgtcaacagacctccatgtcggcatggaagacttgaccgccctccccgcagagtggatcgcccagttgagggttcgtcgtcaactcccgacttctcctgactgcctcgaagtagggatgctgacttgaccgttcactctttctcctctaggcccagggtctgtcgaccgagcagctcttgaagctcgcgcaagacaaaagccgctcaatcgttgagcgcgaaaaggttgcgcctcggccaatcgcccagcctgcgtcagttgagctacggcctacagcaagcgccgacgtcggctcctcgtcgtcagtggcgtcgcacgactcaaccggcacgccgtctaccctgccgatcgaccgagtggaatcggctcactcccagacgcctccgtccttgttgtcaccagcgagcaagccgttccttgccgacgctgaaaacaaagctgaacgccagcccatcgctttcgcccccgagcgcgcatcagccccgccacttctggcgccacttttgccgccttcgactgcctcttcagagccggccgactcgtgggctcaaggcttgctcggcgccttctcgactacaactgacggctcgctcggcaaggccggtgccggcacgcgtcggtccctgccgcccattgcgcgaagagtctcgggcagcgccccacccctcggctcggacggcgccggcggcacgcacggccactcgcagagcctgtcatttctctcgacctgcaagacattcgacgccgagggttcggcggcctcactcaccgcgcctcttcagtggaggccgcagtctgcccaaccgacgactggcctcggcctcggcgcgcctccgacacaatcctcgctcggttacgagcagaggtccaccagccgggcgtcttccacccggcctcgcgagagctcgtccgatcacggccacagcgccgtcgatggccctggaggtcaaggtggcgtcgccggcgaggacgaccggccgcctcgtcgacggcagaggcatgcccgcgagtcagttgagtcgttcgcgacggccgcaagcgagctcgactgccgctcgcctcgcgactcgcacgccatggacggcctcgaggagtttggcgtgcctcctgcgccagctttgaccgcaggcgctccgctcccgccgaacacgtttggccaggctggccggccggcgtggctcggcgggcgctctcacgatgcagacgatgacggcagcgaggagtctggcccactacctgacctcctctcgagcgtctcatccaccggccatcaccactaccggacaagcacgacgtcggcggcagcaacaacggcgactgactcacgcctctcggtcgcctcacgctttacggctacttcgcgcgtcacctcgctctcgccctcgaccttctcatcctccgactttcactcgcacgagggccagctcgtcgaggatgcagtcatctcgcgcgccgtccacctgtcgtcgaggccggtcggcgactgggcgcatcacgacggaaaggccatgcggctcaccgtctttgcgccggccttctcgtggcctgccgacggtccagccgacgacagccgatcgccgtcctcgccagcgaccgaaggccaatctcctggggccagtccctctggaggagtgctctttagcacaatctcgactgtcgcctcctccctcgccgacacgaccgacgacgctcgcgacggcgtcgacgccctcgaccaggccgtccggatgttccgggccagaagcctcgacaacctgcgcgcgctcacgcggtccgagtcatgccgttcgggcgccctcgttgagccggcttgacgaggatgtgccccatgttcacctttccctctctcctcttgcactgtttcctgcttgcctgccttaccttcgcggatcattcctcccagcaccttatacccttcgaccaccatttctcgcttacttcaccatccgactggtgcgccagtcgtcgatcgcatgtctcctgcctcggcctgagagagacagaaggacgcagtcaaagtaaggcgcgcgacggccagctgcggacgcgaacggagaagccgcttagccgacctcctccagacgtccaccatcgctcttaacctatcatcgcggtcgagcaggtccggctatgtaaggaagctcagatctgctgctaaaggatccctggcccaccttgccacagccgctgaccctgccctcgctcctcctgctccacccacgtgcgtctccgccgacctcgccgcctccgaccgacctcgcgtcgcgtcgcgtcccggctcctcctccctcccttcgctggcccggctcgccgctgtcccgtgctgcacctgcaggaacacgtcgctcctgtccccgttcctgctcgactacccgtcctcgctctcgcacacgctcgacgactcggcctcgtgcattgcgttcaacccgactggctactttgcgggctcgttcgtcgccgtcggccggaccgacggctgcatctcgatctgggacgtcctgacgcacgacgtcgtatgggtcgagactggtcacgccaagcaggtcgagagcgtcagctggagccgcaactcgcgcttcctgctgagcgccagcagggacggcacggccatcgtctgggatctcgagcgcagcgcccggctcgagaccgtccgcttcggcagcccagtcatcaacgcccagttccatccgggaaacgctcggatctttgttgccacgctcgccaccggccaggtcgtcgtcgtcgacctccggccgagctcacggggccagcggcagattatcgacccgggcctcgcagcagcagcgaccgacgagcccgaccaagggaagggcaagcagcgggctaccgacggaggggccgcaccgacgagcctaacgtttgcccgcttcaatccttccggccggcggctctatgtcggcacaaagaagggcgagctcctcatccttgactcgtgctcgcatgaggttggtccccccggctcgatcgttctgtacgcgctgctcagcccactgaccctctcaccgactccagattttggatcgtatcaagatttccaactcggccgtcaaggagctcgccttctctctccagggccagtacgtcgtcgtcaactcgcacgaccgagcggtccgcgtgctctcgatcagccacggcgacgacggcgacgagctcgctattgccccgctccatcgcttccaggacctcgtcaaccggacgccctggaacggcgtcggctgctctggcaacggcgagtatgcgatggccggctccgggagcaagatttcgcacgacgtctacatttggaacctcaacgacggcagcctaaccaagatgctcgacggaccgaaggaggccctgattggcgttgacgtgcgtcctgctgcgttctcgaggccaaacacctttttcgctgaccgtccctcttgaacgacacagtggcatccgaccaagccggtgatcgcgagcgtctcgggcctcggcagcgtgcatctctgggaggaaaagcagaccgacacctggagcgcgtttgcgcccggctttgaggagctcgaggagaatgcgacgtacgtcgagcgtgaggacgagtttgacgaggtccgtcgcaacggcgcccttgcccatgagaccgatcgcgcgctgacttcgcccctcttccaccctgcgcggcaaaaggaggacgcgagcgaagcgctccggcgcaaagagctcgccgaggacgcgccgatcgacatcctcacgacgacaccgccgaagacggcgctcgcgctccctccaatggctgaggccagcagcgcaccgaaaagcggctggtggtgggagaccgagggcgacggcgacgacaagactgactggtatctgccgatcaagctcggcaaggacggccgcgtctggcgtgattgggagagcctctttgaatgacatttgcgcgagcgccggcagacttgcagacagacacgacgttgcgttaaatgacaggcaggggtagaaaaaatgggaatatggctacagttgtcggccagatgagaggtgcactactctagtcctttttatagccagggacgaggacggcccggaagcggaccgagcccgacatcatggcctggtaggcctcctcggcctgctcgagcgggtagcgctcaatcatgcacttgatgcccgagtgctgagcaaacttgagcgtgtcctccgagtcaaaggccgtgccggacggccagccccggaccgagagccgtttctggatgagcggcatcgaggggatcgcgaggtcctcgggggcgatggcgaggataaggagcgtgccgttgacggcgaggccgccaatcaggtccttgatcgcctcagccgagggcgccgtgcagacgatgagcttggccccgccgagtgctgtcagcttctcggcctgcgagccctcgccgtcgctgacgaggtactcgctcgcgccgagcttggccgccatcgatttcttcttgtcggacgagctcagggcggcgaccctgaagcccatcttagccgcggcctggacggcaaggtggccgagcccgccgaggccctggacagcgacgagatcgcccgggtggacgtccatgttgcggatcgagttgaagacggtgacgccggcgcagagtagcggtgccgcctcggccgggtccatctcagtcgggacagagacgacggcctcggtccggaggaggacaaactcctggtagccgccgtccatgctgacgccgttgatcgcctcgtgctcgcacgtgccgaaatcgccccgctggcagcgcttgcagggcgcgtggccgtcgtatgggctgcacgagccgccgtgccagccgccgccgacgcggtcgccgaccttccagcgcgactcagagtccgggacagcgacgacctcgccgacaatctcgtggccggggatgcgactgcaagcgagggcaggcgccaggcaagaaggatgagtatcagtcatggcttcgtgagagtggcgtaggaggtgcgaacgctggcgggacacaagcacagcgagacgaggacgtacggagtcacgggcataacgccctcccggacgacgctgtccgaatggcagacgcccgaggcgagcacgcgaacgaggacctgtgcgatggagacgacggagggcagcgagcgatggaagcgcgtcagccctcgaggcaggttaagacagacgccggctgatccgagcgaaacgcacctggccatccttcggcatcttgaggtcgacgtcgataacctcgaacggcttcttgccctccttgcagatgacggccttgtacgacttggggagctgctcagacatggtttgagggttgggtggggatcgatgggtgggagggaggctgaatgaggggagcgctgcgcggtctcagcgattgtgtcttttgcgctggacctggctgctcgccaagcgtcgctcgctaggaggcggcaggagcagcagcagcagcaggatgaagtacgcactgagtcgataggatgcgtctggttgatggaggtcgaggtcgaaggagcgacgagtcccttttgaaggcaggccgaggtggaggggcggcggcgaagcttcgaacgccggcccgcatcatcggagcgcgacacgcacgcccacggccgaatttactcgtcccgatacggccctgctgcctccgctccagcatgcgcaagccagcgatagcatgccccggctcggatcgatccgcctggctccgggctggcctcgacctggctgagaggccaagggtcgccgacctttggcggtccttcagggcgcgagcactgctgttcttcgccgcggagggcgagcgcgatcagcaaagtcacaaggctgagctcggtcagtctggacggtcgagcagaaagacgagagtaagcggtactccgagtaggcgtcgagcatcagtgtctgacgagcggcagtaagcggggcgtgcctgaagggacgaagagggcggaggaagctcatccgcagcagcaacagcatggccgctagctggtcaagcagcaccaggggaccgtcctctttaaccctcgagggatgtcgtcgttcggtgcagaacggataaccgccttccgctcggctcgactcttgagcggctcgctcgtgactggccgaggacgacacgatcctcgaaggcagtccggctgccacgctcgtcgacgaccgcgctcagccgacggtcaccttcatctctctcgccagctccctctggaccgccctcggctgcccgaccctgcatggcccgagtgccctcgctctacctgctcctcctgctcgcgcttgcctatcggctcgccgtcgtcgccctgctcgagctcgcaagcagcctcgtcccgctcttcgaccccacgcccgacggcctcctcgcccggtcgtcccgcctccagccgttcgtccgctgggacgttctgtggttcgtgcccgtcgcgcttaggggcaggtatgcaaccgagcaggagacggcgttcggctggggatggctcgggacgatgcgcgcgttgggcggggttgtctggcggctccgagcaggcgaaggaggaggaggaggagggctgacggtcgaggacgtcgtgcttggcgggatggccggtagctggctcgccggtctcgctgctacagcgctcctgtacgagtgcgtccctaggctttcgtgaacccttgcggacagctcgcgctgccgaagctgacctcccccccgggccggcacccaaggctcacccgccggctgacgcactcggccgccttcgcccggacgacgacggcgctctacgtcctctcgccctcgcccgcggcgctcgtcgcgccctataccgagccgctttacgcatgcttgacgttcagcggcatgcttgccgtcgtcgtcgtgggtggcggcgagagcggcgcccagagctcgagcgcaaagagggcagcgctcgtgctcggcgcgacggcagcctttgcagggtcaacggccgtccggccgacggggatcctcaatgccggctacctcatctgggcactcgtcatcgtgccctggcttcgaggtctacgtcgaccagtcgatgtacgtcttgcgagattcagacggaaaccgagcgataacgagctaataacgcccttgagccttgtccaggttgcgggccgtctggtcatcgctagcgtggtgacgtgcgccgttgccgctcccttcgtccacgcccagcacggcttctaccgacagttctgcctcggcctggccgagttggacggcgcgccgccggtctggtgcgccggccggctgcccctcctctacacgcacgtccagcggacgtactggtccgtccctgctcctcctgcgctcagcctgagcgatcttcacgctgacgtcttgtcccgctcatcgtcccccgctcattcaggaatgtcggcttcctcgcctactgggagctcaaacagacacccaactttgcgatcgccggcccgctctacggcctgctcgcgatccaccactggacgttcttacgcggcgccctgccaggcttcctccgccaggtgcttccttcccgcgtctcgcccacgccgtcgaccgccgattctcagctcgagaaagcaaagcgcgaccgccccggcttgccgccgccgttgccgtggctcgccccggccctcctaccgttcgtccttcactcggcggccctcacgctcatcctactactcgacgcacacgtccagatcctcctgaggctcgcgcagacgaacccggccgtctactgggcggcggcgggtctgatgggcggtgacgagctgccctggcaggcggcgttccgacctcgagcagcggcggcagatgagcgccccgcccgcgagacgagcagcagcgagggacgctcggcatggccgaagctgcgcgtctcgagcctgcccgacgccggcgtctggtatcttcgctgggtcgtcggctggggcgccatcacgaccgtcctctgggccggcttcttcccgccggcgtgagacgtgtcatgtacttttcgccttgctcggcgctgcgtgctctggcggcaggttcgtgataacaaatcggtacaggacatgaggagccgggataaggagacgtcgagcaggaagaccgctcgtcagaggaggtccttcgagaagtccatctgcgacgggccggcggtcgggtcagcggacggaattagcgcaaggaagtcagacggaacgcacctcctgccggatgaggccgccgaggatgagctcgcgcgtatagacgccgacgccctggtccttcagctggagtggcaagcgtcaggagagtcagcgtcccagcacgaggggcagcgagagggcagccggccgcactggcttccagagctcgcggtcgggtgggcacgagattaagacgtggtgggtcgggtcgtcgaggaaggtcttgaagcgggggatcgtcgccaagagctgtcgatcgttccaggcaaagggcctgtcagcatccctcgcctttgaggcgacagaaaccagagtcagggacgcaccttgcccttgtggctctcgacgatgcgcttcaggacgtcaaagtcggtctcgacctggcgcgttgcgtagaaggtgatgccgttgaggaggccgacctggccggccgcgcccgttttgtaggcctcggcccgcgcgaggacgttcgggagcttgatgccgtagcgggcctcagactcggggtcgttgagaaggtggtccgccgggtctaccggaagagcagaaggtttagcttccggtgcaggatgtgaggtaagtgagagagggatccgggacgcaccaacaaagtgcttggccttgaccgaggcctcgagccatgacttgtcgaggatgagtggcgcggcggcgagggcgcagaggaacttttccgtccgggagatgccactggcaacgaggtctggagaaggcccttcgatcagcggccgtcgcctctaccaactcgatggcggcgaacgtacgagtacactgcgtcggcttggacgccgttctgtgcccggacgccttgagccactgcgatgtgcgacgcgcaagtccgggaggtcagtcatgtcggaagctggccgagagaggggccgacacaccttctgttgggcagccgtgagcgagacctgcgtcgtgagtagctggattgagctcggatcgacgccggaaggtccggccgtcgtcgatctcgcgcgcttgcccgtcgatgtcgagggaacgtcggcactggaacattcaaagagtcagcgacctgaatccgcggcagactcgccgcagactcacggctcgccggtctcgactctagttttcgccttggcggcgcccttcttcgggcctttgcgcgtggccgtcgcgtggacgtcgctttcagtctcgccatcatcgccgtcgagcttgcgtttcgagccagcggccgtcttgcgcgcggtggcagtcgatgctggctggcggaattcgagcttgatctcgtcctcgtcgatgagcatgccgtcgtccgtctcggcgtcgtcgtcctgggcggccgctttcgcagccgccttgcccttgccctttttgctgccgctcgcgaccttgtccggcgagctgccgcgctcgctcgggccggcgctctcgctccgcccggcccggccgccagtcatgagcgtcttgttgcgctttgccttctcgtagtcgaggaggtcgggcatgatctcgtcgtgcaggcgcttctcggccgtctgcgccgcctgacggcgcgagtttttcggcaagatggcggcgtcgtccaggcctcgcggcgtcgaggacggtgccgagacgcgctgagtcgtcttgagcttcggtgtcgtgacgggtggcggagctaccgagaccgccttcagccgaggggctgcgggcggcgccttggagggccccggtgcaggtgcgacgggctcaacttcggcctgggcaagtttcggcttgagggcagcggctgatggcctatcgggcgacgagcttgtcgaccgctccgtgtgcgaggacggtgccgcctcggctggaagaggggaagcagcgcgcttggtgagaggtgggttctccttcccgggcgatgctggctggggagcggcaggtgcgatgccgaccgcaggcggagggctctcgggcgcccgaaagcggtgctccgtcggcgactggagcgctagcgggtcgtcggacgagataaagccgtgcgcccgagcggaagacgtcggcggagcgagatgggctgaggacgatgatggtccggcgagcggcactgcgcgtgttgtcgtctttcgcagaggagagggaacgggcgagggcttgccggtcgatgggccgccgcggacaggcgacgactgctcgtacgaggcggggattaacgacggggctgcgctgcttccgacgagcgacagcggctggccgggcggacgctgcgggacgaggggcgggttgagcgctgctgcatagcgcggccgagcgcccgtcttgcggtcgacctcgtcctcgtcgatctccatcgcgtttccagcccgctcgacccacggccggatgtccttctcctcgaggccgcgcttgccgacgagcgtgaccatgttgacgccggcgtcaaaatgggtgaactgcggctgcgagtggaagggaagcagccgccaggccgcaaagcaagcctcgacccagagatggttgatgatcggcttttcccaagcgacagcgcgtgtcaccttattgccgtagagcctgcaggatgcccagaggagatgtgtcagctcgctggctcgcaaacgttgcgaggtatggacgacatacacggaggcaataacgtgcgtattcgcgcgcgagaagtcgggcgtgaaggtgccgcccatgagctcgatgagcgtccggacgtagtcgcgcgtctcgcccgtgtagttggtcagcgtgacgcactgcgacgaggttgaggagaagccaggtcagctagagtgaaaatagcaacgagagcgctggtggacgtacgaccgaattgaagtccgggatctttttctgcggaaacgggtagtggagcagctttgccattggcgagctcatggcgccgaccgaaccgacgtgcatgtaccatgcgagagagccaatcagcttgccctgcttgatagcctgtcaggcagcgagcgagagggtgagcgcgaatcgtcaacctggcctgcattctgcacggctcatttaggtcggcgtacctggctgtagtcccgtccctcgcgccagcggcagataacaatgtcggcgtcctcgacgcaatcaacaacctcaccggctcgaagctcgacagcctcggtccagctctcgcgtcgagcaaattcgacgtcaagatcttggctgaagaagagcttgcgcccgcgccagacggccgctgcggccggtgtcggggtgagtgtactgctgagctcgcccttcgccgccatctgggcgagcgtgatctggtgcgaacgcgggatagggtcggccgcagctgcacctgtcggtgggcccttgccggccgcgggatgctcgaggactggcggattcgggaaggcgaacggccgcgagtcgacgagcatgccaagcgagaggcaggcgtcgatccaatgcgggaggacggcctcgatgttggcgccggcagcgaccgggcccatgacgaggttgtacatgtcctacgagcgaagtaagagcgagaggtcagctcggtccgaaagggcgtgtgggtgatgagggacgcacgccagacgcagacggcgtgatgaggtgcgtgacctctctggtcaggaatgtcttggactggccgcccgacgcctggactcccgccgcaatcgcttgacggtctccttcgctgagctgcagattgggttgcagccgggtcaacgctgctaatcgctcgtccgggacgtatgcgcgcgcagcgggcaggccgggtcaagtcgatgtcgaggacgcacgagctccgagcagcaaacacaaacgccggagaagtacatcatcgggtcgggcgagaagtaagccgggctgcgaccagggaggattgcaggatgttaggacgagagcggtcgtcgcgccgggagcgcggagctcgcccgtgcagcgctcgacccgacagtcaggacgcactcgtaacggatgttgcttttgacgctctgcaggatccatgatttctggagagaagttgagagcagagcaaggaccaccgcgtgagctccaccaaaaccacgaaatcaagtgcagcagctgcagccctcgagcaaggcaggcggcgcgaggcaagacggaccgtggcgacctcgcggccctcgtccttgcggccggcaaagtcggtcgaccattctgcgaagccgagcgagtcggtgatgacgatcgccttgaggtcggaccctgggggcgggagctcgaagcgccggtgagagctgctcctggccgggaggggctcggcgccgtgggcggtgaggatctcgatgagctgcgagcgcaagacgcgtcaggaggggctaggttgggtcagtgtccggatccggcgcagcccatgagatccagctgatgatccctggatctagagcttggcccgcttgatcgggagacaggagagagaaaggggagctcgtaccccgtcccgcagtggcggcgcgtagctcacgtcgacgtagaaagcaatgcccgcgaagagctccgggttggcgacgacgggcgaggcctcgtcggcggctgcatcagagcggtcgtcgacgccggcggcgatcatagacggcgagagttgctgggaaggtcggcgggtcggaaagctcgggtgggcggttcggggcaagacgacgcacgtcaacgacgcgacggtctctcgcgcgcgcgtctcgttcggctcgagcggcggcagctcatctcggcggaggagtcagtcgttggcttcacgaccttttaccctgaccgacgccaagagggcatgttcacaggccggcaacagcatggtctcatcggtccgtctgacgagcgtgctttgctcgtcggaggcacggctgctgcctctggcattctgttctctgccggtagctcgacccctttttccgacagcccgtctacaaactctcttgctggctctcgccgcatcaaggccactgaatgatctgcttggtctgcagggaggctcttgtggacagtttgcggtcgtcggcagttggcgttcggaccctgggcgttcaaaagggccttgttggtcccccgagggtccctcttcgccgtcagacagagtctgcgagccacaccgttcctaccaagcccaccgttggcgaacgtgtcgagggcctcgtccacggcgtgcgtccatctcttgcttccggctttccccatctcgcccttccttccccctgtgaaactgacctcctttcatctttctccttccttcctctggaacacgcaccctgcccacaccaccaccggcgccggttatgaccagcactcgaccggcctctccggccagcagcacggtctcgctggccagcagcacggtctcgctggccagcagcacaacctcgccggcagcggcgccggttacgaccagcggccgattggcggagcctacggcggcgcgcacggcagcgcccctctcggcgggaccgcccacggcacgcattcgtcgacgacgggcggtggcattggcaagaagctcggcaacgctcttcctgggggtggccacacctcgacctcgacgacgacccacggctcgcacggcgtgggctcgcactcgggcgtcggctcgggcgtcggctcgggcgtcggctcgggcgtcggctcgcacaacacttacggcgacgaccggacgatgggcgagaaggtcaaggatgctctgcccggcaccaactcctcgacgacgcacaacacgcactcgtcgactggcgctaccggtctcggccacggcacgcactcgacgacgactggcaccggcgccggcctcggtcacagcacgcacgacaaccggacgctgagcgagaaggcccaggacgccatgccgggcaacaacacgcacggcacgcactcgacgactggtgctggcgccggcctcggccacggcaacacccaccacacgaccggcaccggcctcaccggcaactcgcaccagtgcgctccctcctctcctctcctctcccctctctcacccctctccttgacacgtcgtgtctgcggcgaccctcgctggccgtgatccgatcggctctgccgaccttgccggccttccgtcgtcgctgctgcctgctggtgtctctgccgacgctgcgccgcgtactgcttgcgcctctgtttctctcctcaaccaactcacttcaaccgagaaccagaagcgctcaaagtacgacggccggacgtcgtctcccttccacccgatcgtcatctcgaccggtggaactctttctccttcgactgttgccctctttgctcactggcggggccttatgcctcgctatggtctcttctctcgtctcctctccctttctctgctccgtgcccgtgctcgcttctttgccttttaggcgaagccccttagccacttgaactccttctcgcctccaatgtaccgccgtctatagcgcctctgaccctctgctcccatcgcatgccccgttaaaccctaacccaaaaccctctccgggttcggagctcgttcgccacaggggtacggtcagatccgtcggccaagccttgccagccatggccagcacccgtggccggtgcccgaggtgtcgcgtcgagtacgccgacctctgggatcatctggtcaagcggcacaaggacgtcagctggtccgccgccgacctcaggggcacgacccttctcgcctgcccttgcggcgccgtcgcccggtcggaccacggcctcaagtcacaccagggcaaggtccggtgcgtcggtcttcatcaacgacacgccagcacctccgctccggcccgtcccgtgccccgtcgagctccatcggtcgcccccgtcgtcaccaccacgtccgccccagcttcggcccgaactccagctccgccccgggctccgtcaacaccagtccgtcggtcgtctgtctccgccaccgccgctgccacttcggagttcgagctgctgttgtccgaggacgagctcacgccggtccgtcggcctcgtcggtcttctgctcctccgacgccggccgactggtccttcagctcgtggtccgagtccgagcacggcgactctgttccggtccccgctcctgcccctccgacctcggcctgtcctccgacctccgaaccctccgacgacgactcttcggcacctgtcgacgaccttctcgaccggttcatgtcgctcgtcaagctgccgacggccgtcaagcctctcatcggctcacaagctcggctctttgccgacgccgccgaccgactcgcctcggccttcgtcgccaagccatcggacgaaacgctgttcgacttcctctgtctgcccaaggtcggcctcgtccctggccttcgagccgacgtcgacctcaagcagcggttcgcagccttcccttccgtcgcctggcccgagacgccatccaacaccgaccggggcgtccgtcctcccgtcaccatctccgaggccgtcgccaaggaggtcacttccggtcgtctctcccgggccgctcgtctgctgtctggttcggccaaggtcgctcctctcacgtcggacgtctcagccgagctcaagcgcaagcaccctgtcggacccgctcgccctttcgctgcaggcatcggcccgtctccaggcatggcgcccaaggcagacatcgtcgacgaggtcttccggaagttcaagctcgacacggcccctggcgtctcgggctggacgcagcctctcctgtcggtcgccctccgtcgtccagccgtcgtcacgttcgtctcgatgttggccggtctcgtcgctcaaggctcagcactcggtcaccggctcctgtgcgcctctcggttgacgcctcttgtcaagtcggatggcggcatccggccgatcgctgtcggcgagcttctgttccggctggtggccaaggtcttgcttcgacactacttcaagccagacatgcttctcccggtccagctcggtgtcgggtcaaagggtggcgtcgagcctgtggtccgagcggtcgaacgggcgcttgcagacgacttgcccaagacctacacccacctcgtctcgctcgacttcaccaacgccttcaacaccgtcgaccgtcgcgaccttgccgcagggctccgcgactttgctccggctctctatcgtgccggtcgatggatctacggctcgcccgctcagctcgccgtcaccggtgccgatggggcggtcgacgtgctcgagtcatcgcaaggggtccgacaaggcgacccgtttggtccgctcttcttctcggtcgccattcgccggacgctggacgacctcgttcgacacctcggcccggaccggctgctgttggcctacttggacgacatctacgttctctcatcggacgaccaggccttggccgaggttcaggacttcttcgacggtcgcggctcgtcccttcagctcaacgtcgccaagtccaagtcacactcgctggccgacatccacagctcagggctcgagctgctcggtacggccgtcggcagtccagcattcaggcggtccttcctccaggccaaggtcgtccatcaaatcgagctgcttcggtcactcggcgacctcaagtctcagcatgcgttgctgctgcttcggttctgcatccagcaggatcttcggcacctccagcgcacgcttcggacggacgatctgcccggggtctgggacgacctcgatgcggccctcgtcgacgcagccctccttcttcggtcctcacctcgacgtctcgacaccgacgctgaccttgtcaccctacctgctcgtctcggtggcctaggggtcctctcgcacgccgaatgtgctccgctcgccttcgcatccggctcggaggcggccgaccgggcgctcgctccagcccttctactcgaggtcgacgacgacaaggccatcgtcacccagcgggcccggtgcgacaaggccttcaacactcggctcgaacgtgtcttccgtcggcttcctcgtctcgagcgcgacaccgtctccgagtccggcacggtcctcggccgacgttggctcggtgtcgtccccttccggtcggtgctcgagctgtcggacgccgaggtcgcctctggtcttcacttccggacgctctgccccggctcgctcgacttctgcgccgactgtggcgacgctgctccgttcggtcacgacgaggcctgctcgggtcgtgctccggttgctctcggccgacacgagcaggtcaagcggctcatcaacaacaccctctcctcgaacgccaagtttcgtgttgttctcgagcctcttgtccccggcactcagcttcgaaccgaccttcgcatcaccggtcccgacggtgtccgcgagatcgacatcaccgtcgtctcgctcgcctcgcaggacgctcgatcggcctctacccgcgctcactcggacctctcgctctcgttcgccctccggtcacggaacgccgtcgatgacaccctcggtctggccgcccgaagcaagaccctcaagtacgctggccgggtctccgctcccttccgtcccttcgtcctctcgtccggcggcgcggtcgaggccggcaccctcaagctgcttcacgcctggcgcgaggttctcgccccgtcgtccttctcgcacctcactcgggttctctctctcatcctcgtccgagctcgggcccggctcggtcgactctgatcatccggccttggcctctgtctggttcaggatgccggtcgctcggtcggtctagcctcttgcgctcgcccgccgctcgtttcatctctcttttctctcattagctcctctctcttccgcgtctcttccgctccgtcttccccatcctccgcttccgtgtgcccgcttccctcttccgtagctctttttttcacctctctcttccccctctcgacgacttccctcctccgtccactcaacacctaggtagccgaccagaccctaccctgtttgtctctgtgcccgtcctgcctgtctttagccctgccttccaatatccgatgctgctcaaacaaagtgcgtccactcgcgatcgcttcgatgactaagtctgcgagccatggtccactctgccgcagattctggcaatgatcgtaacctgcgccagagtcacgcgtcctctaggcttgggctcggcaagagtaccggcctcacctaaaagctgtccgccgtcaacttttaggcgatccgaagttcgttttgtcttgggctcagcctcggcttgcgttgcgcttcagttacggtgccgacacctgcgcaacgttgcctgtctcagcgcttcagaagaggaaccgcgtcgtctatcgcactacaaacggcaacctgccaattcggcaaccttccggtccgagcactttagacaaggagaacagtacccagctctgttgggacgtcggagcttggcacaccgtcagtcaacttcggcagcaccaggcgttgtaggaagcatacgtggaagacaacaaagatgagaacgagtcggacgcccaggagactggcgcttctcctcccgcaatggacgggctgaacacttgctgtctctccccaagcatcgcggcgctcacaacttgcagcaggtttattcaaatactttttggcctgctctaaatctggatacccattatccctttcctgacgctttgctggagcctcgttttgtaagtcgtgtggccctttggtcaataaccctttgctgcaatcaggctacgtgtttgtcgcccgtcaccacagacttggctcagtctcaaaggggcaggttgaggtaacagcgaggttcgctcgagacgctcccgctgattcattcacaggccagcaaagcggggacccactgcgataatttattgaagctttgtgggcgacactgtctacctttagatgtactgagccttagtgtttttcctggtcgtgccgattggctttcgatgagatgttctgaaaatttgaaaaaacggcaagtcggttgtcgccaccgccgttgccgtcatgagaaggctgctgaatgtcgtcaggaaggacgaggatgatgcctccatacaaaaccttgtgacggcgagcgacgcgatgaggagtggggaaaaactaagcagcagcggacgtgaaggaaataggacaatccatgcaactactctgctgctgagcagggttgcaagcgggcgcgttatggtttgctgagcgaggctggtgtgaacctccagtttcaggaagagaggggggggggcaatcgcaggcacgccgctgactggctggccagttgatgacggctgtcgcggcgcaatccgatatggggagggggagggggctcaagtcagtcaatcgaacagatcgtgacgcgggaaaaaagatcgtgactacgataaatgcatcacactgggtccgaccgcccccgccaggttcggtcgcctcttgagcgcgcgcattagactgagttcgaccgtaatcctgcatcaaataaacaaagccccgagcttgcagaactagcctgaataaacgttcaagcctaagctttaaggccgtacacccaaccagatcgtgaatcatgcaatctccattaaccttttctaggggatctgaacagattcaccccatcgaaagtgaagagcaggatatgagctgcagcttttattaagaagagggtccgccagctttggcgaatcgttcaaaaacattctcaagaacatcacgcactgggaatgaaagctttacaataagctcagctttacgataagctcagcttcgccttgtcaaacaaaatatagagccatctgcaaatcaaattccgcatgttttagcaaccaaggccgtttatcagacagtgtgattcatcagacagtgtgacccacatggccttgagcataaattactgagcgcgtgcgtttgttgcttactgcggtgaaaatgccgaggccaagtcgagagacactaagtgattcaatgtgagatgttctgctgaccgtggacaaatcagaaacttcctccagttgccctggtccggcccgacgccgtctctccaacacatgtgaccgtcctgctgccgtctgcatgtatgccgagacgaacaagcttgaacctcggtggtaaaaggcatcttcatcggtttgtcgttgacacgagcacttaccgtctctggaacaggcgacgcgtcttagtgcatacatgtgacgtaacctctgtgagtgaaactcagtagaatcagcagggctggagcaagtgaagctcgccgagcgcgtcgagccaggtctctgaaacacgttttagccgacgagcccaacgacattctgaaacgaccttagagcacttcccgctcgccgtcaccacactctctttcctcacagagctgttctttagctcattatttgccgtccccggagctagccgccggccagcggtcaacccaaactcgctccaaagccggcaaatgaaccgtcaacgctccttcgggttcgacctccgcgctgggcttacttttctcggagttgagtgtaattcggcatcaatcttgagcaaccttttccgaggacgtccttgaattctcttctcccgcacacgagtctggacaattgcttgacgtgattgcctctcctgcagcaaagattcttgtcgtcgccgcaagccattgtggtgctcacgaagtccgggccgtctaagaatgtccccttctcgccttttacagcagcacagcagcaagagtaaggctcttacccctctctgcttttttgcagtcgaacttgccgtcacggccggcctcgaatcgtacaacgccggcaactggattgagttgaagcagatcattgccaagaagctagctcagctcgagaagtacgaggtgtctgacgttgtcaagcaaagcaagtcaatgaagctgcttgtttggggcctgctgggtatttgtccgtaagatggacagcgagattgacctgccccccacttacaaggcgcgctgagtcgtcaggggcaatacctctaggtcaccggccgtgactggggtgagggttaggggtacctaaagttaaaagaaaccgcactcttgcacaagaagctgaggacaccgtttgcgtccctttgccttgaggcaacaatattcctgccgactacgtctgcaagctcaggaagtcgctctgcaggtttaggcaagcacctcgctgtttcgaccaataccttgacgactggctaagagtgtaggatatcatgacggcgaaggcggaaggacatacccgtccaagtgtgacagcgcaaacccgacatcatcattggcactctgatgttgaagcctattgctcggcccccaacaaggcgaagctctgcctttcagctacgacacttgactcgcacgcgaggattttaagtaacactttaaatcaacacagaactcgatagacagtccgagctgcatcatttttaatggtgcgttgcgctttttctgaagtccttcttggaaaatccctctttcgcagcacttttgttgccctctttcgcagcacttttgttgaccgactcgacttgagatgggcgccgccgaattgcgtctggcttgcacgacttgttgggtcatggccgctctgactctttgctcagccaatgaagccacaggataagaaacaaaacagaatatacctcgttcgtctgccacgccgagtgcgatagccgacaagattgccgggcgtcgaggttcagaaagtttctgttgtccagctgatgggccagattggcacaacttgacatatttggccagtcgcattatgttgttgaggtcagaagtgataaatgaatcctctacacaagatagatgaatagtcgtcggtgagtcggctccgaggaaagaactccacgacggggagcgtccctggcatccgagcgccacgacccgacctggaattttggcgtcaatttcgttttaccgctgggcttcattagttacaagtccagataactaaccagcttgactccggacggactactgccgagttcaatccttcaggcgcctcgcccgcggcagcctatgtgggtttgttcgccttgctggatctcaccccgctggcaacgctcgtctgtttggccgtagttggctgccaaagctgctggtgtcgtcgtacaacatgccaaaatactggataaaaagctgcctttaccaacgaaaaagcggtcacagcccaccgtcagcagcacaaagtgattgtttggaatggcagccgcaccccttggacactggtcggaagccggggcttgtggccagccgccgccaatttacattcgccactgcgggggggtggggggggaatattaaaaagaaaaggaacgaaggccatgctttgtccgccactgatgacaatgcagaggccgagggagaacgtgtggctgaagatggggggaggggggtaacggcggaacagggctcgtctcggccgccgccattgtcaagacgctgtccgagccagcctgccttagctggtttttcctctcccgctcgtcctgccggtctcaccgcgccgcacacatctcgccgttgctcgcttcttcgccggccccctcctcgtcacccagagctcggcgggtgaccgcaactaacttgcaaatgacaaggcacttgagcatcagcatggttttgtacacagcctccgactcaatacatcatcctgaggtcacccggcgcacgtattcgtttgcatactggtatgctataccggtattatactgggacaggtactggtagggtacataccggtgtgtatcgtggtatcataccagtgtggtcggtcttcagtgactttgacagtctccctgagcgaagagtgtgggtagtggtcagagcagagccggaagggttctgaggggtcgattgatctgttgaacgggcaaaaagagctgaaaacttatagtatggtacagcatgtcctattgacacggtgccagcaagccaatcagtactataccaataggtctacctgtattatacaggtgggcttaccagtgttataacagtacttactgcactagtaccgtaacagtatgtctactggtatactactggcacacatcccgcagagatactggtgtactggcttggcggtagtgtacattccgttcgtacagttccttacggctcgtccagacggcgtcgatcggactggacgacatggacttgaatgtcacgatatttctgattgtcaccgcgctcgcaggtcgcgcgctgcgggcgaccgacgtcagttgcccgccgagcgcaaagtaatcctgtcgatcgtgatcctcctcaacgtgctgataagattcgcagtaccgggcgtttggcggcaagtgcggggactccctcaaggcctggttcgattgctggtcgagcctgtcggtcttgatcaaatgtcaacctgtgggttaagaacaaaaatgtacaatatggcgcacttacaagcctgtcgtattcgcgcgataaagaagccacgcatgacgcccacggtataagattacaccctgatatatgttaacttatatttgacaagttttatcaattccttaattgtctaacggctatgatattcgcctctcacgcgaagggcccgggttcgactcccggttagggattactatttttgcaccatggttgccggttcgaaggcttgggccagcagaaggttagagctccgtgttcaatttcgtgtaggacgacttctcctccacgaagtcactgcgtccagaccgcataaattcgaggcggcgagtggtgtacttagcactgagtgctaaccttactcccatgactttgacactgaaagctgggcttctcggttatgaaggcttcgcttcggcttcaggactcatcgatgcctgttttggccagtctccattaagcggggtggcggtcgtgcccaagatggttcccctgaagccgagagacaacaaaggggaagatgtgcaggtagcagggcccgacgagatctaatcttgcgtcacacttaggtttcaaagcaagcagagattccgtccgtctttgtgtctcgccggagtacgcgatgtacacaaaattccagctttgggcagtcctcggagcgttggtcgtggacaattcacactgtgtgttggtggcggtgtcaggcgtttcgtttcgaaaggcgtaagcccacatcagcgaccttcgacacttcctcctgctcaactatcacccagtgcttcacggccacctgtccagtacacggatgtcggccatccgccggcagatggccctccccaaaatgtgccttcttctgcgcgagtcgactgatcgctcgaaaacctttctctaggtcgctaatccaccagacaacggctaacctgggagcagccggccgctcgcgcgaagcggtagccgacactgtagatttaccaccgtcgatgagatgacacaatggaggcgtgaaaagaagaggggcgcatggaaaaccaagaaagggtacagcgagggggttggcttggggacgcggagaggaacgcgggtgatcgttaaggataaagaaaagcatgtaatatcgcgccaactagcagccagtagccggcgcgcgaccgcgtgagcaaaatccaaactccgattcgtccagtcattccacttgattgcttctccaaactcaatcctctcgcccaacatgcgtcacgtgaagggcgcccggtcaagatcggccggagattattctcctctcgcagaggaaggcagaccacaatccggcagcggaagggatgcttcagaaggatgcgacgggcattctccaacagggcgttgttgacgttcttgttgtaagcgcgcgcggcaggtcccagttcgacaaactagactaacaagcagagcgccgtctctgtcaacgccgtcggtgcatgccctgcgtcctgactaaccccggtctgtgcgcgacgttggcggatctcgccactgcccgcccctcttataggccatataaaccgggccactgacacgatcagtggccaaatgaagcgtctcgggctggcggatccgtactgtatctggtcagccgcggagaaggtcgcgcttaagacggtcgcgctgcggaaggagtggacgtgggacgagcttctcgacgttcgaccaagtttggtacgtctgtttcatggagcgagagctcgtctgtgtcttactgaccatccacgtcatgtttttgaacgatcagttcgagatatcgccagagttccgggctacttaccacaaaggctcggcctaagtatgcgcaatccggctgacttccgctacgtacggagtggtcgttggagctgaacgtttcgtaataggtagcccaaatgtgaaaccactcttcgtgggcctcccctcagcgggagagcgcaggcttgtgatagaaggagacggagaggtccttctcgacgtcattccggtagggcgggataggagctggccatgcctgtcagataggcagcgtctgttcgacgctatttttaggatgcggtcgacgacgccgtcggcgattgacggcagagtccagtggaattcgctctaaggccgtcggcagcttcgctccccgcagcctgcaagacgctgatcgcgccatagctgacgaggtcggtcgctaactgcgtcatccggctttatgaaagagagggggggggggaggtttggacggatgaggaagaggacgagggttggcgctgttgaacgacatggccttgcaggaggcagggcagtcgggtgaacgcttgagatatatgaggacttacttgcgccttgaaaaatgctatgagggaggaagccgtaagggcaggagagtaatgttacggaaggaggcacagcgtgctacgttcgatgaagcgtaaccccaacttccgccgccgccgtgcgggcgggcgctgcagtgcgccggcgctggcgatcctcccgcaaaactacctcgacgctcttccttcaacaggcgccggcaggaggccgagcgggctttgcaagcgatgtcaaagggagtctcggcccgggcccgccgtcagaagcggctgacgaagcctggctacggagttgaccaaattggcctactacgcagcatcaggatcagcgaggaatatcagaccctggataggaggagaagatgcagaaagcagcttttctcttctccatggccgaggcccggcaagcggcttccccggacgacgaagggtacctgggtacggatcccgacaccgacgacaccgtatctcgcgacggtgatggagcagaggattgggcgcagggacaggctcgagaggcatgcgttccggtcgagccagaggggtcgcccaagccgcttcctcggccccgcctccgcccgagccgaacctccagtcacggacaccatagccacaagccccagccaaaacctaggttcaagctatcgaacaagagcccatcagtgcgcagcgcaacgttagaagcgcggaaggccgatctgtcggcggttcgacgcactcctgtaagcccccttaaactcgtcgagcttggcccgtgtcacctgctcgtgagccttgccaacgtaggcgtcccagccggcggcagcactttcgtcgaagaacgagcgctctgttgaagaggcagcgtcgtggtggtttggcgagcggtggcccggcgccggcgtgctgcaggcggccagcaccagcgcgcctccgcccgcccgcgccctctccccccgtgatactttgaatcatccggagccctgcgtgaatttttcgcccggcaaaatctcatcgaggaatttttcctggccgaaagcttgcgctcctattacacctcacataaaactctcacccactgtacgcacgcgctcacaagcccccgctcgtcacgtcacgttgagctcggtggcttagcgtcacggcgtcacaggggggtaggggcatcaaggttgataagtcagtaaatattgtttgtacgccgccttgataatcgtatcgcacccggaatcatctcagcacgttctgtaagccctggcctttcatctgacggctgacaaattttggagcgaattggggaaattttatttgtccttgatcaaggaggcaaaaaggattggttcacagtgaaaaacggacatcatggcctgtttcgaacgacggtctttcgtcgacgtcaatatacttcgaagggcgtgcagagtcgtaagggttgatgaatagtgttgcgagaagccgtgtgaggtcatcaggcgtgcaagtggcgcctgcgaaaaggttgacgctgcgcggtgagaggggtaggaccgcgatgcgatagggccgagacggtggtctgaggtcgactcgacgccagggagatatgccggttctctgggaaagaactcggcaagcttgacgctgcttagtgacatgtcggccttcggctggatccgcgagaggttgcatcagtcagaagcctttctagccgagtctcgacggatggaccgtgatgaaggcggcctcgatcgaagcctcttccgacgctccaggcgccggagaagtgggcgagctccgggctgaccgggattgaagagagcaggttgtcgggccagtggtcggacggcgggctgaaattagaagaggggggaaaaccgctgaggccggggccgaaggcgtcgagctcgagaagtcgaactggctgaaatcgaacgaaggtcgaaggaggaggaggacaagtcagaaagggtgatcgacgcaccttgtacgaatgtagcggaaagggcaaaaatataatcgtagtcagacgctccgccattgagccacccggccctcgagatgagggtgttggaatccagttagaccagggcaggactcgaacccgcaacctcctgattgacgatttaaccgttcagtgaacggctattgttgaagttcgattgccacattgtaaaatatcaatcaaattgatttcgaggttttgctggtgcgaggggcaatggacgacaaaggctcgtcgttgctagggacgacaccacaagatgaagacagcacgagcacgagcaacaccgcttactaatcaactactcggatgtaaatctttatcctgaagccgaggcgacctgtccttcctacccgcgtcgcccttcaccgctagagtcgttccgaacgggtctagcatgcgatacagtatattttagatgatagcgtcgaccatctggatgccctcctccttgaacttggcgtcgaggatcttgcaggtggcctcgtcgtacggctggaggatacccttgttggtgatctggccatcgagcaccatctggacggcgatgccgcacgggacaccgacgagccgggccatggcggacgggccgccggtcgtcgagccgtaggcctcgagcgtcgacgtcatcgtctcgaccttgccgtcggcgcgctcaatgatgaactcgtgctggagcatgacgaggtcgcgctcgccctcggcgtaggcgcactccttgtcgagcgtcgcgcagagcgtgtcgagcaggttgccgcggggcgtgaccttggtcgacgagaagaggccgagcttgcggagcttcgagatgagctggttgccgagcgcgaccggctggaaagccttgagcgtctggagcttggcgacgatagcctcctcactggcctccgagccgatggcggtcgacatgacctcgacctgcggttgggaagcagtcagcgacggaccaggtaggcaggcagtgacgctgggctgcgacgtacccaggtcttggcctcggcacccttggacacgtagggcttctcttcgtcagagaggaagcccatctcgacgagggcggcgatgacctgcgggaagccctgatagcggagggtgccccggatgcaggtctcaacctcgggaatgttgtagaactcgcggaacggcgtcgagtcacggttcgggtaggcgacaaaggcaaatgccggcgagatgaagtagggctgggcctcggccatgagctccttgccctcgaccgagacgaccttgccgtctttaaggtacttgcccgagttgccgagggctgcgagagagagagaaaggcaggtcagcaagagcgcatgtgcaaacaacaggcagcgaggagcagcgcgtaccaagcaggacgccgcgcgacgaccacgagaacttgtagccgagcgggttgttcgagcactcgggcgcgggcaggccgccgcagtacgacttaaacgacttgaccttgccgccctcgcggtggatgtcggcaatcaggaggacagcagcgacgtggtcaattccggggtcaagaccgatctcgttcatgaccgtgatgccggcgtccttgcacttctggtcgagctccttcatagcgggcgagacgtatgacgtcgtgacgacgtcgaccttagcggcgatggcagcctcgatgacagagacgtggtaggtgtaagggatgagcgagacgacgaggtcgtgctcgccgacgagggcggcgagcgccttggcgtcggtgacgtcgatcgagaccggggtcgcacccttgtgcgggagcgtggcgacgagctcctgcgcggtggcgagcgtccggcagccaatcgtaagggcgttgccctggcgaagaatgtactcggccgcggggccggcgacgtagccggagccgagcaggaggaccttcttcttgccggtagccttctcagccttctcgctgccatcctcgaggcgcgcggtgttgacgcccgagaacttggccgtcaggaggtccttaccctcctcgaccatcgcacggccaaactcgggcaggacaaaggcggccgagtggaccttcgagttgtagtagcggcagccggggacctaaccgtcttctagctagtgccttcgtcgaggcaggatagggagttaagtgaggcgggagcaagggtcatgaaaatggtgcttttgcgagtcaagcgagacgaagagcgacgagtgaggggaagatcgttagtgcagagagaagcaggacgaggggcatgatgttgggttcgggttgaggcaatcagcggctgaggtcctcccactcggcctgaaggccggagagaaggcggctcaaagtcagcgaccgggcgacagggacgaaagataaaggctctggaggccacgcacccggtactcgccgccgcggacggttgcgaccagctcatcgaacttaggcgagccggccggggtcgacagcttcgacagctggtaaatggtgcgaagcgccgagcgctggatctcggcctggcaaggtgtaagttgaggcggtcagtcgaggaattctggcttggctcgcctgcgacaagcgcaccttgcggtcgaactcctgcttgacggtgtccttggtgccgacaaactgcttcatcgtctccttgaacgagtcggcgacgtcgtccagaatctgcgtcacgggcgcgggcgcgacctgcgacagccgcgcgagcgacaggaagcagatgactaaggggcgtgcagggtgtctgtcagctgctgcgaaagacgaaggcggaccccactggacgcacccttaatctcatcggcgtcggcgagaccggcgacgacgcgctggatgtagactgggacgtcgatccgggggaggcaggtgtcgagctgagagggtagcattaatggatcagtccagcacccgatgtgagggacagcggtaaaggggcagacgtgacgcaccagtgtgtacatcgtctgctcggaccaaaggaaaggatggacgtcagtcagtcggctgcatctaaacgtcagccgcggtcatcctagcgacacgcacctcgaacgcagtctctggtaaacgtgaaatcggcggtcagcggtcgtaacggagagcaagagaggccggcagcaaaggggacgcactccgggtctcgaggccgtcgtcaaacgtctgcttccaaggtcccatctggacgacgcggatgagctccttcttgacctcggtttcgccatagagcagggggagcagtgtgccgaggtgctcgcggatcagctgcggcttgtgctgggcggcggcgttgagcgagccgagcgagaccttacggacaccctgtcagacggccggcagaatggccaatgtcagtgggagctcgacagacgcaaaggggggtcggaggcacgtacgaggtccgagtcgtgcatgagcgagaggaactcgactatgaacggcgcaagaatgtcgtcgtaggatgaagccgtgtcggtaaaggtgtagcggatcgccgaagcgaccgtcgtccgcgtggccgccgaggtcgactggaggcggttctgtaaggaagagaggtgggattgcccggcacaagtcagcggctggccagcattcaggactgagcgcgacagacctcgagctgcggcaggtacttgaccgggttcgaggtcgtcagcttgccgatgcacgacgcgacaatggcacgcgtcgcctcgtcgctcgtctcggcgtcgtcaaagagcggcttccagagcgtgtcggcaatgtgctcgagctgtgaacgagagcagtggaagatggactgcggagagtaaaagggtgtcaagccgtcagaagagtaacttggacctaggacgacgctcaaacttacctcccgaagggcgtgcagtgacagcagacgctcattctgatcggtcgccgtctcgacgcgctggacgattggctggaggaacttgggcgagccgacggccatgttgcccgcggcaaaggcagcggcgtcccggagcgtgctgctcgagtcgccaaagtagcccaggatgcgattgaagatatcggtgtgagccgacatgtcgctggaggtggttaggagaccgtcagcgcttttgtctgtcgagatggtcttcgagacattggacgcacaccgcacggcctatctcgccgagggagagcagcgcgaggtactttgagggctcggtcgccttgacgctctatagaaggatccgggggtcagtgaacaatcaggtcggttaggtgtagcgcgcggcgacagcacgcacctcaatctgcttggcgaactcggcgatgacgccagcccggtcacgcggggcggccttaacgacgacgccgacgcactttgccgtcgtccgcatcgcctgggcctcgccgccaacggcgttggtgagcgtcttctccttgccgacgaccttgaggagctcggggatgaccttgagggcgagctcctggtcgggagcgataagcgcctcaaagaaagcaaggacggcctcaagcgggaggccggtgatgagcggcgtccggacgagagcaaagacctggggcaggatctcggcctcaatcgtcgccttggcggccggttgcgtcgcgagcaaaagggtggcgacgttgagcgcatgcggcaggttgtagaggtcctgctcggtgatgaacggctggaggtcggtcacgagcgccgggacagcgtcggtcgggagactctcgccgagcctggacggagagggccgggtgtcagtaggggacaatcgccggcggcgcccggcagagcatcaacctcaccggagaaggacggcgtcaagggcacggaagccgtcggccttgtacgtccggctgccgcggcggagcgtgccaggcagcgtcttgacgagctcgctgagccagcgctcagcctcggagcccgcaacgaccgcactattggcgacccgctggacgccgcggatggccgtcaaccggagggagtcattggcgatcgccgagccgaggagctcaagcgcgaccggcagctgcgggccgagcacatcaccaaagtaaaagaggatgtccgacagcgtctcgaccgccttgatgcgcacgtcggcgtcggcgagaccgcctttgaacagagcgctcgtcgcgttgaagatctgctcgatgacgcctctgagctcggccggaagcgcgaccgtcggatccggccgaatcgaccgtgtgagctcggcgaggacggccatggcttcagcgctaaccttctgctgcttgtcctgcgtcagctggacgacgcgcttgacgagcgccggcagggccgaggcgtaaacggcgatcaagtggctggcaaaaaaggcgccaaggaaggcgagcgcctcggtcgtcatcaaaggcgagccggcgatcgagagcgtttcagagaccttgacgagcagtgccggcgcgtacgactcaagtccgcccgagaggacgccagtgagctcacgcaggaggttgaaggccgcctgcttggtcggcagcgacttaaccgcgagctgcttgagtacgcgtttgacgaggaccggcacttgaggagtaagaagggcgatcggactgggaacgaaagcggcagatggataagcaagggagtcgttggtcgagaggcgacaacgcacgtgtcgtccacaatctcaatctcgggctcctccatctcgacgtcgcgcacgccctcctccgactcctgccgcttgcgcttgagcgtcccggggctcatgccacggacgagggcacgctcaccagcctgctcatcagcccgccggccgtcctggacgaggaccgacgtctggcggaggagcgtcgagagcgaggcaaagatctcgagccggaccgactcttcccgctcagagagacgggcagagagcgtcgggaagagcgagcggtagaaggtggcgagcagctcggagcgctgacgaccaggaaagagggacggccaggtcagtctggcagcaggtggcaggcgttggcagggcaggcaggaagacgcacggtcgaaacagtcgcgccgatgaccttggccgcgcttcggcgcgtcttccagctcgagtcctcgtcatcctcgtacctgacacaagagcgggcagtcagcacgaaaacaagagccgggccggagacaagggacgcggacgacgcactcctcctcgatctcgtcgtcgtcctcatcatcgtcatcggcctcctcctcttcggcctcgtcctccatctcgtcgtcatcatcgtcgcccgcgtagttctacagacggaaagcacgagccggtcagtcaaccgatcgctgccggaaagaagtgaaggccggcacgcaccgggtcgtacgaaacgaggttggtcgagacctggaggatctggttgatgaacggcgtaatctcggtcgggcagcgaagcatgagcgtctcaagcgtctgtcggcgacccagttgagaagagttcagcatccggcctgacggagataggtgggaagaagagagacgcacctgcaggccgacctcgcgtgcctcctccgcaccctccgcctcgtcctcgtccgccttgcagacgtcgatgatgctcggcatcacctccttgagcacaccgccgacccgagccggactgctcttcgctagcgtgccgacgagggcgatgtacgtccggccgacatcggcatgcgtcccgccatccttgagcgcatcgagcagcgtgtttgcgaggctcgaaaagatcctggggccagaagagggaacgagggcgccgatggtggagatggccttcttcttgacggcgactcggccgtcggcgatcaggctgatgagcacgcgcagagcctccttctggagcgcctgctgggcgaggacgagcggccggaagcgggcaaacaggtcagagagaatatcgagcgtctcgagcgtctgttgcggagggagcgaggcctgcgaaggggatggatggcgggttagttggcaagatgaaaagggagagggtccgggagcgcgtgcacggacattctcgagctgcgcgagcagcttcgatggcagccgctcgacaatgacatttgcgactgccgagtcagccgcaatctggctcgtcattgtcttgagagctgcacaaaagcggcgacagggacgagcggaatgagttggggcaggtgcgagagagaggcaggccgttggcagggaggcgcaccgagcgaagcgacgtcgcgcgagtcctcgtccttgccgccggtgccggatgagaggacggtgagctggtcgatgaccttgattatttgcggctggcgcagtctcgggcaaagcgcgctcaacctgggtagggaagcagtgaggttcagtctcgtcctgagatcaggctagcgatgacagggtggaggcgaggaaggggacggacgccttgacgcctgcattcttgacctcgccgttcgtgtcctccatcaggcgtagaaccatttcgaccagcttggcttcggtgtactcgtcgacggtgagcggcgtgctcgcgccgcattcggtcgtgagctcggtgagcgccatgaacctaggcaggcaggggtagacagagggggtcagctcgtcgggcaaacgcccgcaggagacagctggcctaaacgcaccggagatccgggtcgtccgactgcgacttgtcgagcagggcattcatctgaaggtggaccatcgtgaaagaacgtggtgattcggggtggtgggcaggaagaagaggacgatctctcgtcgccgctcgtctccatctcgggcgcagggcggagtctcgtcgacgctgccgctctttcggactcgccagcaacgacgaccccgaccttctaccaaagcagtcccttctcgaccatgctccgcctgcccttccgtctgctgccccagcgagcgttcgctcgtccgacaccggtggcggcctgcctcccgcgcgccaagtcgacgacgacgacgacgtcgagctcgacaccggcggtgcccgaagacggtgctgctgccgccgagccgacctcgacggcttcggcaccgacgtcgcgcgagatcattgccgagaagagcaagctactcgagggcaagtatgcggccgcgctcaagcgcaagatggaggcgtacgttatggccgttgcagcgcgagcaaaggaggccgactcgctgactgtgcgccgcctttcgctgcctcgcctcgcctgtcctgcagtgagggtctcgagtcgctcgaggagctcaaggccaagaagctcgcggctgagcaggctgttcttgttgccacccgcgaacggcgagccatgtcggcttcgacggcgtcggcgtcaggcgccgcggggacctcgctcaaggggtcgtacgtcccgcccgtgcctaaggcctcgtcctcgtcgccgattgcagtgcgttctccttgtcagcctatcggctgccattcgatgactgctgacgatagtattcactgcttgcgcagcccctcggctcaatcctcaacctgcccgccctcctgtcgacgccgcatccctttccgatcctagcgcaggtctgggagacgctgcacgcctcgctcgcgctcgcccacccctcgcgcttcctctcggcgacgattcccgccgacgtctacacgtcaatgctggcgactgcccggcaaacgccgcagatgattgtccccctgccgcggggcgacggcgaggagttcttcttcctccagtggcagttttacgagggcgagcaatcgaccgtcgtctttacgagcctgggcgagtacaagctcaagggcgagtgggcgaggccgttcctctcgatcacgcactggaccgacctcgcgagtgcctccggccccgagccagagcaccaaggtgccgtcttcatgcgggccgaaatcacctcgacggcccctccgaagccggccaagctgcccgcgggcgttgcgccctcgcccgcggccgagggcaaggagcgcttcctgctctcgccggccgacgcccagctgctcctgctcggcctccagcgcttctaccaccttgcgtccggcgatgcgtcggaccgcgagcagcggcgcgacctcgtcgctcgcttcgcaaagggcgactggtccgaagccgactggcgcgggctctcgaagctcgccgtcggcaagctcaaggggatcctatgagcgggtgcgaacaccaacgaagtctcgcatcagagcgctaagctgtctctgctcagcgatcggccgatgatgccgtgtgaaagcccatgctcagccgacccacttgacgacgcacccgacgtccctcccgtcgccctcgccccctccctcttgtcccagcgcgccaaacccaaccccgatccactcaccccccttgcccgcccaagcacagaccccaacggcgcccttgaatcgccagctcttcgccctcttcctcgccgcgacgtcccatagacagaccgccccgtccgagcccgcgctcgcaaacactgcgcggctcgggtggcccgcgagggcgttgattgcaaagagggcatcgccgtcggccgcgtccggcttggccgcgagccggtgggctttgaacgcgtactttttcgactggtcagagggcgagaagtactcgacagcgatgcggccgtcgaccgagcaggcggtccagcctggagcgggcgagtgagcgcgatcgcacgtcagcggttaattccctcgtaccaagcggaggacaacaacagggcgcttaccgagcccgtccgacatgccctcgacatccctcgtgacgcccttgagcgcactctcgcgtttctgctccggctcagcccatccttcgccttcccctcccgccgctagccgccccaggtcaaaaacatacacgagccgctccgccatcgcaacgacgagtcgctcccttgtcgacgtcagcgcgagcggcttggctgggaggaggatcgtccgacctctgggtagaggaggggttgaggtcggaggggcgagataggcgaggggcgaaggaacgaggaggagcgaagggtgaaaggagccagcgacgaggagatctgcaggcgagcaagatgagagaaacatggtctttcagctcttgacgacgttggacgagactgggtgatggtgcggaaggtagacggaccgtggcctggagagtaaacgagagacgagacggggccgtccatctcgccgagaatgacgccttcccttcgaccaatgtgccagctatgatcgttgtgataagccgaacactctggtcagtccatgcgagtaaaatgcgcgcgggacagggcgtcgttggggcagcggcggtcgagagccaagggagactgacgcgcgaattcgccgatcagcgcccgcgcagaagacggtgtcggaccctgccggaccccagcaggcggcgaggagcgggccagggtgctcaaatcggctgcatccgggcgcggtgagcgaagaagctgcgaggcgtcagcgctgatgggtcggaaggaggtgaggccgactgcgggcggcagccgagcagccgagcgtcaagctcaggcaggtgggtgaagggaaacaagcgggcaggacaagacgaacaccagtggcggtctcggcgacgcggtcgacgtcgacgggccagcggcggccgagaagcagtcgtagatggcgagtgtctgtgacggggtacgaagggccgggacctcagccaggcgcgaaggagcaacgacgcgacggtagggggacacgcacgccgtcccatgcagcgagcagcgcgcggtcgccgtttgccggctcaaaggcgagggccgtcaaggtcgctgctggtgttgcgaggtggacgtcgtcggcgggcatggctgctagtggtgattggaggcggaggtgctgctgtgctgtcgtcgtctctcggagagccccttaacgggcttcaccctgtcgatctgcatcgaccctgcatggttcaggctctcgaagagcgacctagctcgacgaggcggcatgctccttcttccccgccgaccccccaacccctgtcatggacctcctccagcccttgcccgaacactcgccgctcaggctcaatgaccaccatcatcaccagcatgtcggcttcgatgagctcgtcgagctcatcgtcccgccggccgagctacccaagggtcggccacgggtccagctgcgcaagatgttcgtcttacactagcgttgtctgccgctgttgacgagctgacgacgtattccaaccttgttctcctcgcaggagcctgcccgtcaccttccagagcaagccggcagagtgcgacctcgacgaccgtgagtgtcttctccttcgccgacgacgaggaaggctgccaaagatggtgacgcagggagacagcgagggggtctccgcatactcgggaccgacgggaacctgacacactcgtcgcttgaccatctctcaatcttgtcctcatcagcctcctttatccccaaccgcccgcgccgactctcactccgcctgccctcgttctcacggacgccgacgatcccactcggctcgccgacggccgtcgacgggcccggcggcggcggcctgcggagctgtctcatcagcggcgctagctcgacccgtcccgccggcgttgctggaccgtcgaccgccacatcgtcgtcgcaagggatcgctattcccgggtcgtcaaacagaggcctcctcggccgctcgcgctcgcacgagctctcacccgtcggtgcgggcgcatgctccttctcagccctattatcggcctcgccgccggcgcagtcggcgtcgtcgtcctcgtcgtccgccgcccacctttcctcctccgttccgtcaagctcgaccctccccgtcctgcacgtcccacccgtccgccggcgcccatcgaccgtctcgaattcaggccggccgccttccctccctccctcgcctggctcgcccggctcctcgcccggtatggcctcgtcgctcctcctcccgctccgaaactgctgccacgcctgcgagcggtcgaccgagctcgcccttctcgggaaatgcgtcgagcaattctcgccgggtgcgcggaagaagcacgccgacgacctcaaggagcgcgcggcggatgaggcgatgcaggcccgctggaagaagggcgcgatccgcgtcgatgaggtcgcgaagaagcgcgagggccgcgagacgggtctaagggagacggacccgccggcagaggaggatgaggacgctttcggtgccgctgtaggcgaagaggccaacccggttgatcagacgctgcagtcggggtcggcgacgacgacggccgacgagcccagcgtccacacgaccgagacgcggctctcaacgccagcgacagacgaaacgttgagctcgacggcgacgaccacaacgaccgaggcgagctcgctccctcagacgccacctctctcaccctcggccggcttgacgccctcgcaagcccacgatagtcgctctccacccacctcgcccgcagcatcctcgccagccctcgtcgtcaaggctggaggcggcggtgcctttgctccctccggtcagcggccgactccacgctcgccgccgttgcagcagccctcggccggtcagcatccggccaagcgcaagctctggggcatgacgctcgggccgctcccggccttcgccaaccctttcggcgcaggccaccggtccgtcgcggactcgggcgttgcgggcattgcaggtggccataggcggttctcgtgagctggcgccggcgtggcttgagctcccctccccccccccatcgcaacgtgtaaggccatcctcgtctcttggggccgagtgactcagcctcgtagcccccaggcagtcggtcggcgcaggatgcctcggcgcggcacatatccggccctcgcctagggcttttgaccaacagcggccgtcctcagccatgctcgcgacatttgactcgccttcacccaagccagtcccgcactgttgcttacccgtacccccaagtccttcagtctcaagttgttctacttaccttctcgcactgtcttccttttccctcgcctttcgtccgcccacacgtgcggccgcctctgtaatcacccattgttgtcacttgtcacccgtcctcgttgtccaatgtatccgacttgctttgcttcggactttgcttcaaaccatggccatgcctctgccgcccagggcaggcaaggaacggcaggctgtcgtctacgcctggtcattgccgctgaaaatgtttctgaccgtggttgccgttgtggccctatgtcgatacctacttctgcttctgctgcccccactcagactgcaccgcggccataccattgtcgctctgtccaattagagtctcaccgcagagttgcagagttgagaaaggccatctgcacaggcgcaacagccggattgagtgagtgtacaacgaagaggggcccgggggggacgggcagaagtcgggtaagcgtgcgctgggaaggaatggagacccgaagggtagcagagcttaagaaggggtgtagaacaacagatgacgagggggagcgaaagcaaaggggaagagggacgttgaaggggcgaacagcaagtgagggggtggaaggcagctgatgccggccgcggtgaatgttggatgcgagtgggcttggggacgaagtggctcacgccggcgaagcgtctgcgccctgagcccctcctctccaccagcggaggacgccatcgacaactccaccgccgacgccagcgccagcccgaccggcatcaccctcagcagacgcgaggacagccgctcccgctgcagccgccctcgccctcgcagccgcctcggcccggtcctcggcctcgaaagcggctgagatgaccgaggcgggcagatcggtcggcacgccgctcgcgtagacgaccgggtcgagaggcgagtagcctggcggggatgtctgcgagccttcctggccagggtggctcaagccagccgctgctgaaggccgggccgtagctgaagacgagtcggacgaagacgacgtccgagaagagcgcgtcgtccggtggtcggcgatcgcagagtagggcgtcaggccaccgtcagccggtgccgatgctagaggtggcgagcccggctgccggttcgcaaagaacgagtcggtccggagcgaatgaagcgatatgtcggcgaggttgggtgtcggcgggttgtgcggcaggagcagcgaaatcgcagagtcggccgagccgtcgtcactcgcgctgctgccatcgttgtcatggtccgagagctcggcgtctcccttaacagcctcatctccagcctcgccctcgtaaggatcggccgccggatggaagacgcccagcgagcggtcgacgggcgagatgtaaggcgtcgtctctgcgctgtcgtcgttgccggccgagcctccagccgacctttccactgctcggcgagctgacgaagggcccggaccggcgacaggactcgtcgcccgaggggttgctgtcgacgacgcgcccgatgcgacgggcgcctgcgagcgtagcggcgacgggtggacaggcgtcgtcgaggctgacggcggctttggccggcgcgagcggtgacttgtccgtcgcgattgctgtgatgcgctaatgacgaccgcagccgacgaggtcgacgatccatctggccgacggctgctgctcccgctcgcaagcgagctcgcactcatccagctccgacctccgtcgccgccagcttggtcgtcgccctcgtctccctcgccagcacctgctcgagtccgggcaatgaagccactctcgagcaggatgctcccgcgctcgctcccgtacgccggcggcggggcgagcgtgccgatgctcggcgcgagtccccacttcttgacgttggcctcgatgaagacaaagccggcttggccgaggttaacgtggacggtcgccggcccacttgcaccgacgcacggaaacaggttgaaacgctggaggccaacaaagcagtcttcgtgcttgcggccgttgcgcgtgaaaaagaccgtgcctgtccgaggccggtaaccgacgccgaggacgtcgccctcgcgcagaggcggaccgtaagaatgagcggtgaaggggtagttatgcgtccggaagccgtccgagccgtatgcgaccgagtgccggctgaggcctgcgagacgaggcgggccaggaagacgcgtctgatcagcgggccagccgccatggcaagagcaggagtggaggtgacgcacccggcagccggaagctcggatacggcttggtagccagaccgatggcgacgtcggtcccatccggtttctcgtacatcttgcactcgaaatagtagacctcgttgagctttggcagcgggaggttggcgagcacgctgttgccgccgccctcagcggccggcatgcctggcccgtcgaggaacgtaacctcggttcggccctggacgtaaacggccatgttggactcgtagtcgggctcaaacgaccaggccgagacgcccttctcctggatcgtgaggaactgcgagagcgtgatgtcggacgggaccgacgacggcgggtggtgcagctgccaatctacgagatgggccaaaacgcaacatcagcatggaaagcagggctcggcgagccttgtaggaggcggacggacctttcgcccgctggtggcctcggcggacgtcgtcgtcctgctgctcgagccatctcgcctcgacgccgtcgactccgccctcgccccagacgccgtcgccgacgctgagatcgaccggcccgccatcctctccgagccttaacagaagagcgaggagagagtcagcccagggtgagacgagagctcgcgacgacgggcgaggtctccgcgcatgggagaggagacgcaccggatgcgcgctttgcgcttgagcacgatgacgaagatgagaaagacgaggatgagaaagagcagcgtcgagaggacgatcaagagcgggaggataatgagcaggatgttgccccctccgccgttgttgccgccgttgctcgggccggttgggtcgggcatcgctgggttgggaagcggcggtgtgccggctgcggcgtcggtggaggcgacgagcagctggtaggggtggtgaccaccgccagcgctgccgccactcaacgagcccgcgacggacaggcgggtattgtcgtcgccaactggtcttgggaggccgccgagcgagctttggtcgaggcggtcgagtagggcactgagcccggcggacagcgaggacgaagccgagggcggctcgaagggaggagatcggacggccggagcagcggcggcggcgcggccctggcgaacgaggcccgccgggaagggcatctcgacgggaggagcgagcaggagaggggtttgatgtatactgaggaggtgggagggcctgggcggtcttgctgctgctaaaggagtggccgttgtgggctctcgggcgtcgtcgtccgagcagctgctgctgctggccgtctcaccgccgccggccgcgctgtgtccgatcgcccagagccaagtaagtggaggaggcagctcgaccttgcctggtaacctcgacctctcgacccgctcagacccctactcgccgcccgccatgcatccgcctctgcacaagccctcgaccgaagcaggtacgtcccgtgctagaagtagccgcgcacggcgggctcatcccgtcgcgggccgcagcggcaaggaattccgactgtcgttccgagctgaccttcctgtcctcctcctcaacagcctgccgagacgttatcgccgcgctcgagaattgtcacggtcagtggaagaagtggatcggtggttgcaacatggagaagatcgatgtcaacgcctgcctgcacaacgaggtgcgtctcctgggctcgctcctcgaggcacccggctgagagctgacagctctcctcggcaaccttcacccattcaattagcgcgtcgctcgtgccaaagctcatcgagaagacgcgcgcgagaagaaggttgtccgggacgccaagattgccgccattctcaaggacctcgacggcgaggacgctgttccccagtgagcgagctcaacaccaggtccaacgcagcggaccagcaccctgccagagccagacgggagagcagggcggacgcggccttaactgctggctttcgtacgccgactcgagccagcctgtccattgcttgctagcaccgctctccgatctcttcacacgtcgccaaaaggccgtcactgtttgggccgaaccggttctgcgtcgacggtcatccttcatagcgcaacacacacacactactcctccctttgcacgtcccatctcattcggctccacctgttgtacggctctcgccggatatccatcgcatgccctccgatctagtttgcccgctgactggaacgactttcgcccttgtcccctgcgaagacgtttgtcctgagctgaccttgtttaacattctgacaagccgcacaatccctgcctgtcccgacaaaggtaccgctagaagacggtccggcactgacttcgattggtgcttcttgtgcttgggattgtgcgcgtacgccgtgcagccaaagacgcgcagccggtcaaatgacgggggtgagccgaaccagtcgtcatgccgcgtccggccggtcaactttcggacggtccgggccagaacgtagagcgcgtaggtcatggcctcggcccagtacgctccgggcaggcccgactcgagcaggagggccgtgatcatttcctcgatcttccggttcgcgcgctccgccttgccgttctgctgcggcgtgtcggcaatcgtttgtctgctgacgaattccaagcgagcgaagccagctaacaaactcggtcgataggtactcgccgccgttgtcgctgcggattgttacgaccctgtgaccgctctggcgctcgacctgcaggatccagcctttgagcacgccggctgcgtcgctcttggccctgttcgaccaagcccagtggtagtccatgtactcgtcaatgacggtgagcatgtaccgggcgccgccgagcgaggtgtcaggcatcgggccttgtaggtccgtgtggaccagctcgaggggcccgctgacgaccttcgttgacgtcgggaacggcgtcctgtgctgacgagaaccgacgcaaggctcgcacacgcccttgtcgaagtaggccttgaagtccttcgagctgatcgcattaataagcacgccaggataacgcagaacagcatccatcgcgttccgggacatgtggcccatccgacggtgcagcaggtcgatttcgaggtcggccggcgtcggcgtctcggcgtggttggcgacatgattaaggaatccggccggcggcagcgtgacgtcgagcgcccagaggttgcgctggtaggccttggcccgcaggatgatgccgaccttgtttcggatgagcaggaggtcacggtcacctaaaagcgagatgcccttgacatggcaaagctgaccgagcaacgcgaggatcgtcgaagagagggccggaacatggaagacctcctcgttgttgcgtccgtgcgacatgacggtgaccgtgccctcgccaacgacgtccattgcctggccgctggcgatgtagaccgtgtcagcgtcgggctcgtacgagctgaagagtgtgcggtcgtcgacgcacgtctgggagcagccgcagtcgagcaagaagcagcgatccggggccggcgagacgtgcggccagttggagtctgaccaaggcctttcgtcgtcggcgaccggctccgggctgggagtcaccgagagggcgaacttgctgaccgagggccgaaggccggcggcgatcacggactgccaagctgacggcgttgccgacgtgtcgctgaccgccgcccgagccgtgctggtccttggcgttgcagtcggtcgtattgtgactgatggtcttgtggtactcgcagtacctcttgaacttcgcccggccggcaccgccgtcctcgaagccgaacttggcccggtcgggcagttgagggcaaagtggccggggccgccgcagatgaagcagacagtcgtggccgacggcgtgagggcgagagccgagtgggttacggtcggcctgtcggcggcggaaagccggctggtcgtcgcggccaggagctgggcgtcctcgacgagggacttggcgacgtagccgaaagtgagcgataggagctggccgacggcgtccttgccgacctggatccggatggatgacttgagcatctcagccgcgagcgtaaccggcagcgtgcggaggagctggtagccgaagagcaggtcaaggtccttgagctccccgccgatccggcggatggcgctgatcttggtgaggaaggcgtcatctgctcgcggacgttggtcccctggaccatgcgcataccgagcagctacatctcgtcggccgtgccctcgatgaggcgggccgcccggaggacgtcgaggcgctgcttggccgtcgtgcactttcagacgcgttcgacctcggtgtcgtcgagcttggcgatgatgaactcgatggcggcctcatcgtcggcgtcccaggcggcttgggcgagcgggtggccggcggccggaggagctcggcggcctgtgacgaggtcccggagtctcatgcccttgagggcagactggaggcggcgctcccagacgccgtacttgacggaggccgaaaggggcgaggggaggcggtcaaacttggcgcgcgaggtgtcatcgcggagattctcataaagctgcgtcatgggcggcggagcgttcgggacgaggttaagcagggcgtcggccatcgtgaggaagggggtggagggctcagactcttaatctgttgaaggacacggccttgtaaggggcagggcagtcgggtgaacgcgtgatgtcacggagggaggtaaagcgtgttacgtttgttgaagcgtaaccctaacttccgccgccgccgcgcgggcgggcgctgcagcgcgtcggcgctagcgacccttccgcaaaactaccacgccggtctctcttcaacagcgttgtgtcgactgaattgtcggcagcacacgggcgagagccgcagagactgtcgaagttgcgacgagtgcggcgcgcagagccagcggcggcagcaggcggctgcgcgcgcgctggcgaccgcgcgcctgccgatgcactcctgacgcgcggactgcataggcattcctcatctgttctctctccctcttagctttctcccttgacccccttccgtaaagagttagtccacttcttggtgactgaggtcagtcccatctttcgcctttttgctcaccgcttgtaacacgtcctgaccctcactctaggtagctcaatccgtttcgtccttcgctcaacaggtgcctagagtatctcatgtagatccacttcttggtgactgaggtagctcactccgtttcgtccttcgctcaacagagacattgggggcggtagcgaacagcgcagccttggaagccttgtcggcgggtgcgctttcgcacccgcgtcgattgccccttggcggaagttagcttcataaacgcggggcaagcggcccggtgcagaattttgtagttgcgctcaaagtttcgtgcttggccaccctagccagtccctgctggtcttcgctggtttccaacggcggcgagctcaaccatgcggaagtgcgctctgcagagcaagccgctttctacgcctctgcagatccccctccttgtgatgctacagcaagatagagtaggaaggaatcagactaatgtgcatcctggtcaggatcattacggcaaaacatactattccttcgaggctcttgcgcagacgcgtcttgccctccacagcgcgattgttcttcagagtggccccgccgacatcctcagcgttggcggcgtagatgcgaagtgctcgagttcgatgaaagaccctgagcgtcaggtcaggggcgtgtaattggggtcatcagtcggatgcagggccgaccgcgagcggtggcgtgctgggcctgggccggcagggcgggcagaggcggtgggtgtcatggtggtggtcaggggtcgccggtgtaggatctaacataaggcagggcctgctcagtctcaggaccactccgtaaacgactcatagatcccacctgtgggacgagacaatattctgcacgagcagggagccagaggaccactcgtagactggctacgatgggcgtactatcgcatgccctacaagatgtcgcgggtccaggggtcagcggacggaggggaggacgagcaagacgcattttcggctcaaacagaggcatcctggccggcgactcggcgtctcccacgctgtgaaacctgtacatggcagacatgagcatgccgacgagcgacgacgatgcgcgcctggacgaactcccggcctgccatctcgagcacgcagacaatctggacatcttctcgttgtcaatcgaagcgctgtaagccaaagtagacgctgtcagcaggtggtgaacaaagaccagtatgctacccaacccggccaaacctctgaagctgtatgaagacgagctcgccggcgcgtcggccgaatgggaggtccagacgggcggagtcaagcagaatccaggtctcggcgtgaagcgttaggttgagctagccgataaggtggagctgaagaaagggggctgcggtcagacccaggcgtcgacacctcgttcagagtgacgctgcatcgcacgtgcgtccagcggcagcttgacaaaagtccatctgttcattcaggtccagttgctgagagctcgagtatgccttggcgacccgcttgagcttgtcatcgagaacgtcgatgtcgtcctcgccagcgtaaccctaaaagaacctccgccgccgggtgagcttacgcgggcgcgctttttgctcttctgataagtctcgatctttttgacgtggccgacctcgaaaatcttgaggaggctggcggccggtgttgggtctgatctcgaccgtgtcgtgcaagagtggtagatggggtgtgcggttgagcaggaaagactccagatgataatacaccgccgccgagtcgagacacaccagcatcttacacggaacatgtacttgtactgaattagtgggcatactggtactttgctctgcgctcaggaaaggctgtcaaagtctgagcggaccgatactaatgactatgtaccagtatgcctaactgtatggtactagtattggctactggtacaccgataccatagcagtcttatattgtaccagtaccgcatacaccacggacgaccaggactgtgattctgagaccaaccggaggagggtactagtaggtatactggtagcataccagtaggcatattggtatgtcctaccaatatgaactgggactgatactgataggataccggtctgcataccagtacccccccggcagggcatactgatatctcaccagtatggtccgccctgactttgacagcctccccctgaacgcactgaccggacatttggtggtaagtgcaggaactttctgaaggctcacttcgattgcgaacgcgttcagagtgtgtggatcgcagaagtccggaggtttgccaagatgaaggcatgctcctcggcgacagagagcggcgcgctgcaacagagatggtttgcggttagatttgtcctcctgcgagagtttcgactttgttctttaacagccatgtcctgaccgctatctgcgtccgctggaaggtagtcgggccgcgagggcaagagcgaggttaggtccttggctgaagcgatcgaaaggctgatgtactgaccggctggagctcgccggaatggcaaagggcggagcctcttggcgaagggcggccagatgcatggcgagggcattgagaatatacgacttctcgttatacgcccttccgcttatcttcgcatgaccatcagcaacgccgacgctagagtcgtccgaccttacttgacattcctacgctcgggcagcctggtcgggcagctcgtcgttccgctcgatgcgtccgcccggtccacccgttgttcagagtacgacacatgagctgacgtgcgtccctctcactggcttcagtcactcacgtgcagtggcgtggcatggtatatgcgctcgaattgaatctcaacgtccttggcgtcggcattatcagcgagcagggcgacacggctctcggaaagcaccgatgcccgacgcggtggccgtttgtcaaccggctggaggctaaggtttaccaggaactcggcttgccgacacttgcgaactcggccggcaactacagcggctcctagctccgcttcctctccaggttcataagcccgctttacccggttgtcgtgattcgaccctgccagcaaaagtagatgcccggctttgggttcgaatccaggtcgtcagcccatacggcaaaagagacgtcaagctctaccaatttcccacccgtcaccggttcacacttccacgtggaacctctaaagccaaaaccgatcaccaccggccaagtctagacccggcaaccctcagccgacggtcgttctccagcaccagctccgccggcgtgagtcggcatctccaccggatcagtcaacatctccaccggatcagtcagcaggcacagccttccagaagattcttcgccaccacactttagcctacttaaaccccggtagaccttgagtcgccgcctgaatctcaagcttgcctcctcgttccccccatcactcgtcctcgcccctgagagcttcaaccttcccccttgctagccacttgcccctgaattaacactgatcaagcacaccggctcaggcctccggttcaaggcgtggcgtctcgagctcaacagctcgctgaacaagagcgcccgggagctcacgatggcgcctgagaaacataggcccgttgtcctcgataaccgtgtgcgctagaaagcgacgacgagccggctccgggcgatatcgttaagcaaaccatattcatgtattcggggataaagcatgcaataataagcatcgggtgtctaggtgtgtcgtctgaagctaccacatgttgctcgttgctgccgccggaaagagcatttgactcgagcttcgcgcttggctgtcgaacgcgatggaggcgccctcaagcggtcagagagcgcctcttctgagaaagtagccgctttcgacagctcctctctttctcacggacaacgggtgagtgcgcgcctgcaattaaaggcggttgttcggacctcaacaactggcgtgtaggcttgcagacccggcgggtgcagtggtacaaagctgcgcatgagacgagggccttttgcggctggcgtcaaccgggcacggcttccgttgccgccgaatccggggccgggtccaaacgcaatgatctgtcttaccggacaaaacgcgaagtcggacgacagtagcgtcgaattgttccggacggcagggccctcggcggttggcgtcagtccaacggacgccgcgctgctgtgcgtgtgtgtgttttcaatcaattaaaggctgttcagaggcggtcctggggagcggcatcaccagcggcgacttccagtacaagctcatccttagccagctgtcggacggacaaccacgactccaacaagatgctgcagcaccttacctgcagcaggaggcgctctggcttgtcattgaggcagccccggcggattgcccgctctcgtacgacaacggcctcgtttgggtggacctcttgaacatcccttcacgatggagacggagcccgaaaatcattgcttaattaggagtttgagctgccggacgcgagaggcagcgagcgtggtttgcgcaaccccctcccccccgccccgggccgcgaggttgcatcatgcatttcatcaggctcccctctgagcgcaccatctgagagagtcgtcagtcaggatgcctgctgtgccatggtcaccacctttcgctcaagccaaagacatgcagcaacaaggccctcaagaccacctggagcacggctcccagcatgcctcccagccgttccttcagccaggggcctgacaggctaggtcttcggcaaccccccgccccgataccacccatctccccttgctcatctgttctatttcgacgtctttagtccggaggtcgacgtcgatcgtgggacgagctgcgtccgcctggcacatctcaacgctcctccgcgatccaaaccttcctctggtaggtagcactgtgaccagcagagccgggatcagctgaccgcaagaaaagtcttgataatgatcaaagggctaatgtaggcactgaaagtggtcgcaggctgtttggtctggcgtccgtattgtcaagattgagcgcgaggcaaggccgccaccaacccatctgctttgttccgacaagacagacaaaagcactggctgctgacggcccctcttcgcccccaatcaattttcatttcgtcatcatgccacgagttggtcataacctctgaatgacttctgtcagtcttgcccaccggtaggatttacatcgacaaatttctgactgaggaggtcttgaattatgtttaagcagtcggcaagaacggcggaggtgtgccgagcgtcgacaagctagctacgcccgaagggagactgcaggaaagtcggcgccgctgttcgttttaccctcaacacccagcctgccgctggctttcttcctagcgcgtcaaagcgcaagctcgtagccgtcaccatggaagtcttcttgctgctgtcacctccccgagccaacacgggctgcagttgttgattgttcctcaaagccactttgcaaaggtaagacttctcgctttgtttcggccattgatatccaagctagcatgcatgggcttgaaatagaacataattggccgcgagataatggacgcggcgctggcgaggagtctgcagactggcgagactgaaaattttggttttctcagccctcccaaggtcggtcgaacaatcgatacatgagttagagcatctgcaaggatcttctggcaagagacaaataagagagcgggctgactgtcgatgactcgatctcaagattagcacagccggaatgaaagctcacctatcagtgccccctcgagccgcttcaattgtgcttaatgcaagcactcttatacctgagatcgtgggtcttcttgactgacgaagtatcggcgcagcgatcaagccgatcacatgacggtagtacctcgcaaaagctcttctgatcctccagccttacaccgttaatctcagactaacacactggccgtttttcgtctaacttggaaatcaaaacagtgattgcaattatgcgggacacataatttcttcggacaacaagtttattcagcaatcaaagggaaggtcaattcgcagcgaccaaggacactcttaaagagaagaaaggggagctggaatgaggatgatctagttcgtacctctcccgacccgacggctgagttacaaacactgagcagaagctgattcttctgtatagtggtccacagaaggctagctcctagcacatgttgaaaactattcattcttcgacagcttgcaggcttgtgccatgcaacctctgtctgacacaagcttgactcttgccggtaacttgagcatcagtgcctcagtcaatcaactgaattacagccacacttcttccatactgggtcaacggtggtgcgccagagaagtcgaaactattataatagcccccggcccacattcacccactatcaccgcgtcattctcgctctacgactccctaaggcggccgtgatataatacaatcgtctggtttggtcaagcgatgaaagctgggattcagcagcgcagttgcaagcgatgaaggctgggattcagcagcgcagttgaagttgtcgatgtaaggctcattgagttcacccaggggctcacttcaccgctcgctttccaaacaacgcgcatgggtggtacgccctcaatttcagagaatccattaggtagccgagtatttcaagtccaccgaaggaattcctaccaaggtgaatttgtgcgtctacgttcggcagtgcgggctcgacatcatcgttattgcgatctccgtcaacattcagcttctggattgcacgtcccgggagtccattgacgccttgaacaataggctaaacggcatttttgagtgcacgggccacgcgttgtcggctacttcctcaactttatcggcctgacaagagattgttcgtctcgcagaaaaactaatttgaggctctctttaacgtttcgacgtgcttgactgcctccattacatccgcggcacgtcggaccttgccctgacctttgtcgccgacgccggccagcgacgccaagcatgcgctctcaatcatgatctgagcccgcgcgccgccgacccatccaaacaaactaaattaagctacgcagcgcttcaatcatctctcatgatgtcagagaatagcaggagttgtcagcgctgccatcctttttgacgaccatcaagtttttttcgtagagactcaacatttttccccgtttcctacctagggtttaggcctcagaagctgttcattcaaaagcgcctgctctcatgctgagcagccctgtacctatgctctttgacctcctgtgatctataccatgaccttccctccccctttaggctgttcctctagtccagcatggagctagctacccgacgagcaatcggctgagtggttacacagagctaatgcgctgtcaatagttcaactgctcgagttggcagacaatgagccgacgtttgttgacgagcttcaattttactccttctctttctttgagggaggcgctacgatagcgagcagggggcgctttatgagggacccagatggacacctcttcgtccttgtccgctggtgttagccagacaaacctctcgccttcaaagctgctcgacgaagtctccgccacgcagaggctgtcgctgtatgagcggtggcgtcttcatgcccttttgtggggcgcatatgcgtcatggacatgcgttatggtgggtgtcgctcagaaaaggaagacaggcagtcgtgtcggaggagcgtcctcgccgacccagccgcactggacctttttcttgagttggttgttgccatgttaatggacaggccaggaatgctgattacgccgaaatgaaggacagagacgctaaacgcaaccgggaggcagacgttgaccctgtcggagctgatctgtagtcgatctccggcggtggaggcggcgaagacgggaagggcggcggggcgagtggcacgggcggcagcgacgccatgttagcggccctctgctgggtcagcctggctggcgggctgcggtctcgtgctgggttccgacgtgttgtcttgagcgtctggttggcagcgtgcgtcgtcgggtcatcggctgacgtcgtactcggctggctgacggcaggtcgaccggttttggcctggcgtctcgacctcgacgtcccttccgctggaccatcaccatctcgcagcattcgactcccccaggctctcggcctcgctctccatctcgtcaccggcgttctcatttaaaggatggtccttccggatgccctcgagcatccctttgcccgtacgagcttcgaccaagcctctagggagcagccgggcagcgtcgacctcgccacccgcctccagccgacgtacgtccgtcttctcgcttgttatcttgtcctcagactcttctgacggcagctctgcgccaccttgcgcatcagcaggctctaggacgagcagctcgccatcgtacggctccccaggcgcgttgtactttgctgggtcatctgttctcgctccgctcgcagcgccggctaccgcgtggcgcgggagaccggctgctttcgggctcgtgctgggattgccgctccatgcgctcgcgttggctgggctgaccggtctcgcttcgctcgccagggctgattctgcgtcgccgcctcggccggcggcctcgctgtcgcttggtcggccgtcctcagcggctcctgggcgattttccagaggcggctggctcttttacagcgggcccgggttgttcgcgcctcgggcgaagccgttaccgccctttgggcgggcagaagtcgagatcgagcgtgagtcgagctaaaatcgctggtagacctgagcatcagcgaaggtcttcgccttggcagctcaatcttgtctccctctcgacgtcggcatcgtctcgccgaagacgacgtctcgggcgaggagggccgtccgagcggccgggacgtgcaggcgccaggcttgtttgtccgtcgcgtacccgaggaggaggcaccatcggccgacgtcgtccagcttcgtccgcttctccgatgagacccaggcataggcaacgcatccgaacggccgaaggtggctgaccgatggcgtctgaccgaacccctgctcgtgaggcgatgcgcctctgagggctcggtgcgataccttggacaagaagtacttcgcgcccatcaccgcctcgcctcacatgctatcgggcaaggtcgactccttcagcaagcactaaacggactccatcaacgtccggttgaagcgtttggcaacaccgttcgactgcggggtttagggcacagtcaagcgacgctgagtgccggcccgttttaggtacgtctcgaaggccgtgctcgtgcattcgccgacgttgtctgactgcagcgccttgatagattgtccagactgcttctccgccaagatgcgaaacgacttgaaggcttcgaacgtctctgacttcttgcggaagggggaaggccaagcctttctgctgtagtcgtcgataaaggtgacgatgtagcgcttgcctgaccccgtctctggcttgacagggtcaacgacgtccgagtgtacgaggtcgaagatgcgtttcgactgacggcttgacattgagaagggcaaccggtgcatcttgcccagctggcacgcctcgcagacgtctccgcaggccgtcgtcgccgcgaactgcacgtcattagcagcgctgctcgccattttcctaacggcatccaggctgaggtgcttcagtctgtgatgccacgtctcgagaggcgcggcgacggccgcaaaggcaacgtgcaggggggccgggacggcctttgcgtcgagcagaatcgaggggccgcggtgcgaggccgtcatgatggtgcgtccgtccttctcgatcatcgcgccgtcgctcgtcagaacgcagcgtgccccttgtcgtcgagtcaagaccgagactgaaacgaggttcgttgtcacatctggcgtgaacagggctcgtggcagctgccgtcgagtgattttgccgttgacggtcacgtcgagcaccggcgttccgtgcccatgtgcttaaatcgaagactctttaattgccgttgcgaggggctatggggtcttaaatggcgtgtagtcccggagcaagctcttttgctgcacgagctgcttcgcacttccaacactgctcccaggtgaagccggccggggggtcgcggcgcttctcgcgcttgcctgccgagtcgcggccaggatcgttcgtggtctgccggtggacggccatggcgccgagctggccggtgaccgtcgtgacgcgcttctgccgctcggcttcggccaggtagcgattggcgaccacggtcggcgtgacttgggccggcgggaggttgtcgaccgcgttggtcagggccttccaggcctcgtcgctgacgtgctcgatctaaccctgcaggatggcgacgtgcaggttgggcgagatggtctcgccgatgaccttgagttcggcgatgcgtccgcggatcgtattgatgtgctgctccatcggggtgacctggtcccagcgcgtggcggtgagctgccgaaggagtgactgcaggttgctgctcgacttggactcgtacacgtccagcagagacgtccatgcggcggaggcggtcttgtggtcgaagacgtcgaacgtcaggtcgttgccgagcgcctgcatcaagacgtggcgagctcggacgttgctcttgcgccatttattgagctgagcgccgggctccgcgggctcaacctcgtcgccctcaacgagggcgaggacgcccgcatcctcgaggtacataaggatgtggagcttccattgctgaaagacgtcgtcccgcccgttgaagaccgggatcttgaaggtggtcgaggtcggggcggaggtaccgtgggtcgtttcgtcgccggcaggcatcgcgagcttctgtttagagttgattcgggcggggatctggggtcgtcggcagaggcctttggagcgggcgatgcggatgggggttcgggcaacggggcaaacggcagcagtttgggggtggtcgatgagatttcttgtcgagagtcgtccgagtcggatgatgcgatggatgggctcataacctgtaggaccaggcagagggtagggccgactacagtgggtgtgagctactgcctaagctaaaggggggctagactaagggggggggcgaaggtacctcattctcaggactactccgtgaacgactgaggtttaggagggagagcgaacgggcgtccagctaagaggagggagcgaaaaaagagaggaggaaagagtccggcggactctaaagcgtggcgcccgagtggccgctgggcggtcgcctagcgcgtccaggttcccgcgttgcccggccggcgccggcgcagcaacaccttcaccagaaatgccgatgcagtccgcgcgtcaggagtgcatcggcaggcgcgcggccatcagcgcgcgcgcagccgcctgctgccgccgctggctctgcgcgccggcccgcactcgtcgcaacttcaacacagggagacgtaaacgctgtgtgagcggcggccatcgatatctgccgaggcgtagtccgcgtccgagtagacctccaacgtcgacccgtttctcccgcccgcgccgtaggtcagcgcccattccttcgtcgtcacgaggtaagcgaggaccctcttcagcgctgaccagtgcgtcttgccagggcaggccgcgaattgggccagccggacgacggcgaaggagaggtcgggccgggtgaccagcatcacccacagcaggccacccagcagttgggcgtaaggtacgcccgacatctccctcctctcctcgttcgtctatgggctttgggccttcctccggaccaagctgagatcgagcgggatgaccaccgggtggggcgacgtcatgtggtacttggcggcaaggtgctcgatgtaggccgctgggagacctaaagcatccttcgtgaccggtcgcgcacgacctcgatgccgaggcagaagcgcatctcgcccagatccttgacgtgaatgctgatgcgatccacgccttgacctcgcctaggatcttgacgcccgacgcgaagaggccgaagtcgtcgacgtagacggcgaggtgcagctcctccccctcccaccgcagcgagtagaggccctggtccgccgtcgaccgctcgaaaccgatcgccgtgagtgcctcgtgcagcttgaggtaccactgcctggccgcctgcttgaggccgtagaggccctcgtgtaggcggcagacccagtcctccttgcccagcttctccaatccagggggctgacgcatgtacacctcctcctgcagttcgccgtacaagtaggccgtcttgacgtccatctggtggacctcccagtcgcgggaggtcgcctcagtaagcagcaaccgcaatgtcgtgagttggaccactggtgagaacgtctcgtccgcgaagtagtctttgcccacgacctgactgaagccctgcgcgacgaaccgcaccttatagcgaaccgtcactccttgtgcgtccttcttctccgcgagcacgtctcggcagccgatgatgttgacgccctgcggcctgggcaccagcgtccagccagaccttgtgcttgtgcagcgacgccatctcgagctcggctcctgccctccaggcggggccgttcgggccggtcagcgcctcggtcagtctttccggtacgcccgaacccccagccttcagatgaaaccccgctgctttgaacagactgtgttaagagtctgacgctctaccgattgagctaacagggcgcgttgagattttggtttgaaaatgacgtgtctatcgcaaaacaagtacaaccctcgtcttcgtcgcgcatcacaaactagactgccgcgcactgttcgtctgctagacgtatcggatgcgcatgaacgaatgaaggactcaagctgagcattatgagactcgctgccccaagccttgaccgcgcgcagcgagcgccagaagtagtggcggcctcacagcggcacgcgaaagtgacgcagcaaggcgagcggcgacgagctcttccttcgattcgactttcactcactcccttcctcccgcaagctcgccttttcgcctctgcagcagaagagcgcgcgcttccgatgcccgcccgtgacccttccgtctcatcctcgccctcggcgacgagccacatgtcgtccgccgccttgcgcgctcggcgcgcgtcgcacggctctggcccggcccagacgcatgccggcgcctacccctccatcccagagggcgaggacggcggcagcagcagtctctggagtcggcaggccaacggcgacggccatcgggccgctgacgaaagcgctatcagcttcatgagcacggacagcggcgaccttggcctcggctcgaggaagggcgacttgcacgtcggcggcgtcggagcgcgccggtgagtccttcccatccctcgctcgctcctcctttctctctctcccttcgctggctcgcctgggcccaggcgcatgatcgttggcgtgatcactagcgctgtggtctctggccggtggcagggggtccacagaaggcggtggtgcgggcgctggcagcggcggcagctctgcccctgttgccgatacggggtaaggcactgccgttctcttccctcgacgggctcgcccttgtctggcaccgcagagctacctcctcgactagatttcacacgctctggtcgttgtgactggctttttgcgactcctcctgcttaactcataccggtcgaggcctgaccaagcgctgacccctgcccttatcgcgccgctgcctctgcttttcagcatgtctactgtagccggcgtccctgcctctatgtttgttcctcactcgttctcggcgacgcaatcgtcgatccggtcgtcgaccgctcggcttgccgaccttgcctcccggcaggagcacgcgtcgcacggcaccagcagctctggcaccggcggcgaacggagtgcgagcgccggcgccgccgtcgcagaccacacgaagcaggaggtctccccgagctcgctttccggcccctcggcgctcagcatgatgctcgccttccagggcgtctcgcctccaaaggccaaagacatccttagcccgcgcaagcaggccgccgcctcggtcgccgatagccaggacgagattagcccgagcacgagcgtgacgccgcgggcgtcccagttcgacctccccggcgccctgggcgccatgccgacgcccaagccgtcgttctactcggagagcgccctcgacgtcagtacgccgtcgaccgacatcagtgacggcgcgacgccgcccgttctccctcgcaaggaggcgccggctgccagggagtcgcactcagacgagctcaccccgctgctcacggtgtctgtgccagctgaggacacttcatctcggcagatcgtggctaacaagaccgacgacgcaaccgaaccggccatcaagaagcgccgtctactgtcgtcgctcacccggcgactgccgaccatcgagttccatcgaccgaccggcaaggaggttttcgacaacgcagtaatggctcctgtcgccgcgctaccggctgtcatcctgggtctcctactcaacgtccttgacggcgtctcgtatgatgagtccctcccgaggtcccctttcacccgggcttgccgtacgcctgtgctgactaccgcctcccatgccggccctcctcgcacgcatgatcatgtttccgagcaacgacaccttcccagactttggcgcaccaggcgtcgccatgtttttcatgtcctgtacgtcgtcgtcgccgccggccgccgtcgtcgtgttagccatccgttgaggactgacccccccttctacctctaggcattgtctcgcaattgacgttcacgctcggcggtagcatcttcaagtgagtctcagcgctcgttctcacaagcgatctgcgactgatcgccccgctcgctcgtctcatctcgtccaggggcggcaatggttcgatgatgatcgaggccgtgcccttctttcacatcttggtcaacctcatcacggccgaggtcggcgaggacaaggtgcgctcttggcccaatcttgtggaggacacagccgacacccgtcctgatccttgcgactctcgtcaccagccgcacgtcatcattccgaccgtcatggccagctttgccttcagcgcaattctcaccggcatcgttttcatgcttctcggccgcttcaagcttggggcgctcatcggcttcttcccgaggtgcgcgagactgccaggctatctacctcgatccgtatcctaacactcgctgctccctccggcgccagacacatcctcgtcggctgcattggcggcgtcggcgtcttcctgatcgagactggactcgaggtggcggccggcctcgaagacgtgctcttcaatcaccagacttacgagcaaagtacgtcgcgacgtctcccttgcccgcctcgcttgattgtgacctgaccgctccgccctcgcccctctcagtgtttggcagctggcacaacgccttgctctggacgctgccgctcgtgctcgccatccttttgcggctcatcacgctccgcttcacacacgagctcatcttccccgcctacttcttttgcgtccctgtcgtcttctacatcgtcgtggcctgcatcggcgctccgatggacaccctgcgcgcgagccgatgggtctttgacgtcggcaccaagaaggaaccctggtaccgcttctacacctgctacgacttccggcagacgcactggggcgctttttggaaggcaatgccaacgcagtttgcgtgagtcccacctccattcgaagcctcgtagccccagtctctccttgacgcctgcctcatcgaactctcttcagactcgtcttcttcggcattttgcatgtcccgctcaacgtgcccgccctcggcgtctccctcagcgaggacaacgtcaagctcgaccgggagctcatcgcgcacggctactcgaacgtcctcgcaggcctcatcggaacggtccccaactacctctgctacgtcaatacggttctctgtgcgtagtcttctttcagcgagtctgccgccacccacgcgcacctcactgacatcgacctctgcctctctcgcagtctaccggctcggtggcgggacgcgactcgccggctgcatgctcgctgccgcgacagccggcgtaatgctggccggcccatccgtcattggcttcctgcccgtcatggtcgtcgccgcccttatctttgtcctcggcattgacctcgtcaaggaggtgcgtcctcggttcgttgcagtgcgttgaaccctctggctgatagaggtctgtctttgcctctttcgcccccctaaggccctctgggacacgcggcacaaggtgacggctttcgagtatattacaatcgtcgccatcacgatcggcatgaccgtctgggactttgtctgggggctcctctttggcatcgtcatcgcctgcttcttcttcgtcgtccagtcgtcgcggcggcgggcgatccgagccggtgcgtcgcccgagtcgggccagaacctcagcagccctagctgaccttgagtacttttgaacccgtccagagttcgatgggtccaccgccaagtcgactgtccggcggccggccacccagcgtgccttcatcaaggacatcggccgccagacgcaggtgatgaagctccagggcttcctcttcttcggcaccttcagcgccgtcgaggatgaaatccggcgcctgcttgacgttgccgcatgggagcacaaccccatccgcttcctcatcctcgacctctggtgcgtcgaccagagccacgctcggctctgcgacccgtcaggagcaaagggctcacaggcgcatttctctcctgcaggatggtctacgggctcgatttttccagcgccgaggcgttcgttcggatccagcggctactggcggccaaaggtgtcgtcctggtcttctgcggcgcgcacccagagggcgccgtcggcaaggccctccaggcggtcgaactctggtcgcccgaggactcggacggtcaggtccaggtgatggacacgctcaacgacgcgctcgagtggacggagaacgcctacctgtgagtgcccctttccgcggcggaacgcctgccgtgcctaaggaggctgacgcggtttggacctcctctctcgcagcaccgcattctacgccgcgccgcaacgtaagcaggaggcgaccccgatcgacctcgccctgccgcagtcgcaggcgccctttgcgctcggcgactccttcgagaacagtccccgccgccggcatttggcgcaggcgggcgacaacacgatcgtatcggatacggcccaccacttctcccctgccccgcggcacaacgccctaccgtccaacaatgcggcccccagcctgaaggccccgctaccgctcctcctcaagacctttgcgcccttcaccgaccttcgcgaggagttctggttcaagattgcgccgtacttccggctcgagcactttgcgcagggcgaggtgctctggcagcagggcgatgaggccgagggcatgtacgtcattgagcacggcatcctcaaggcagtctaccaggtgcgtctctgctcgtcttcctcgtagctcgagcagactctgatcgtctgactgtctccgtcccgccagtttaccgcgcaggagcaactcgtctccgagtcgatggtcgccggaacggtcgccggcgagctgacattcatctcgcgctcgccgcgcaacgcgaccgtcacggccgagatggcgacatcggtctgggtgcttgatctcgacggtcttgagcggctcgaggacgagcagccccgcgaggcgatcaagtttgtcaaggtgctgatgaaggtcagcaaggaggagcacgacagtcagtaccctctgctttagccgccgacgagcgacatggcagttgctgatttcgcgatggcgctttgcctcccgtcttgcagtccttacatcgaacctcgtcaccgtactctcgtaagccaagccctgaaggaggggaaggagaggaaggaactttcacgcatcaacacacgcagactcgattgcttcatgccggcatctctagatttacgacccgacccacatgctcgtcattgtatgacctcttccgcgctccgtcgagtcggaatgagagctagagggcgcttcatccctgccaacctccctccccaagagacagactcggcgcgacgaaatctacaaaacacatggtagcgagccgcacagtcagccgcggcatggcgcggctgggcacagatccgcacacgaccgagccgctatcactcaggcggtccggagaatgaggtggacgccgctgtcggtcgagacgacgcccgagacctcgccgacgcgcaagcggaacgtcgcgtcctcgaacggcttctgcatctgcccgcgggtgaagaagccgaggtcgccagccgccgagtgcgacgaacagtcggagtggacctcagctggacattgcgaggccagtcagtgcgtcatcggttggtcggggcgacaagggcaagggcagaggagggaagagagggcgccggcggcaccacgatcagcggaagacgcggtaaagtccagccagccggacacataccgagcttggggaactgtgaaaggtcctgcttgatggtctgctcgtagccctggaggatagcgatggcctcctccttggtgcgcgtgatggaaggctaaacagggccgaagcaggtcgtgagggggaacggggcaggcggcaaggtcagtagtccgtctctcgcttagagagcagaggtcctccgagaaaagatcttccccactgacttccttccacgagctcggccgccggctgcccttgtgcttgacgagcaggtggctcgcgcggacgcgctcggggccgacgccggcacctccgccgccaggcgcgtcctccttctcgaccggccggaggtggtgcgctccaggtaggctggcgacctgagctgggctgaggctcgcaggcgcctcccagatcgaggtcgaggtcgagggcgagtagaagtaaggcagctggcgcgacttcgagaagcggatctcccagtcggcagggtcagactgaggccggggcaagcgacacggtcagcatcccagtttccaacggagagcgtggccagcggcctggatgcccggttcactgaccatgatgggcagatggataagaatggacgggcggcgggcgggatgggtgcaggaggctgagttgctccctccgaccgcgccggcgggacccgaagcccatcgagcagcgcgacgaggtgacggcttctcgacctcgacgacgaccggctcgaccccgacccccaaaaccaagcatgctcgcctctagctctcgcatacaccgcgcctggctcgaggcctgttgcctgtcacagctccggtcatacgcaggcacgtcaaccaggctgccgccgacggccttcgacccgctcggctttgacggcgacgagccgacgccggcgcaaactccgccgcgcgacgtccggtcagagaagaaggcttggaaggcccaggcggcggccgagaaagaggtccttgctcaggctcggctccagcggatggccgacgaggtcgagcagggcaaacgacgcaaggtcggcgactgggaggcccacctcaaggagcaagccagggcgcgggacgagcaggcccgcagcaacctcgagcgcgagcgcgaggacaagcggcggcggaacgtcgaaaagttcctcgtgagtcgtgtcctgtcgagcaggaatggcccgtgtactgaaccagtcatcctctgcgccacacacggcagagcgcgaaggcggccaaggcgaaacgggcagccgacgtgcgttctcgtcctgctgcgctcggtggtggattgtgtcacgtactgacggccgtacttgcttcgaccctcttagcgtctagcacaggaacaggcgagaatgcgactcgaggaggcgatgcagcgcgctgcctacgaactttacgtgcgtggcatacctccaggtcgaccatgacggtcgttcgtccgctaacgcctagtcatcgtctaacagggctcgaggcgtcggacggcggccaacgcacccgtcaagatctatgatcacgactcgcactatgcggcgctcgcgctcggcctgatgcaattgagctcactcccgaccgacaacgaggtcaaggacgcctggcggcgacggatgcgcgaggtgcacccagatgtaccaggcggcagcaccgacaaggccagcagggtcaaccaggcctttgaggccctcgagacgggtgcgtccgggcggcggctttgcttcgaggccctttagagttacagctgaccttctctcgttgcatccaccctgcggcgacagatgccaatcgccgagcgtaccagaggaagggcatggtgctgagcggcgttgggggcatttatcgatgaccttgcacgcatcatctcatccgaagcggagcgacagctgtggaggcgcagaagtctaatgttgttgcgctggcatccacagttgcgcagagactcgtccactcgactccctttcagttgagcgtcaagatcgtcagcgcattcaacgcttaagctctggcttcaattccctgctctcagaagcccgccagacggccatgagtgtactcgtccgcgacgcatgcctctggccgggcggacttgcgcgctcggctcacggcgagcgccgtcggttctcgctcgaccgcctgtcaaccacaccagccttcgcaactcgacctcgcccttgcctcttcatccttgcttggcagactcgctgttgaccctccgcagatggccctcatcaccgtctctggcttcccctcagccggcaagacgcgctttactgagcgcttgacgagctcgtttgaggcgcgcctgcgcgacccggcctacagcggcccggcgctcgagctcgtccgaattgaagacgacctcggccatgtcggccgggaagcctactctggtgcgcgatggcctgcctgcagtcatagcggagtcttcagggctgactcgagcgacgtggtcatacgcggcagagagccggctcgagaagcccgtccgggcgagcttcctgacgacactcaaccgcaagctcgccaagcggtcggtcgtcatcgccgacggactcaactatatcaagggctaccgctaccagatgaattgcgcggccaaggaggccggcgtccgctattgcacggtgcgtcccctgcagaaatgctgagggcaggacatcacgaagcgtgcgctgccagaggcggggcggcgcagcggcctacctacttgactccggtcgcctcgtcgccatgtcctggtgtcagcacctcgagtccgtactgacccgcctaagctcccatctgatatgctccctcaggtccatgtcgcggcaccggtgtcaaaagtcgaagagtggaatgcggcccggccagacggcgaacgctacaccgagtcgacgtttgtccctggtctttctcatccgctcgcctacgccgttggctgatcgctggcttccgtctcgcttcactgctttccctcactcagtctcgccgcgctgattatgcgctacgaggagccctcgtcgatggtccgttgggactcgccgctcttcaccaccgcgtgggacgacgacgccgacgcggtcgagcggacggtgaccgacatctggaacgccgtcacgacggggacgatcaagaaggcgaacccgagcgtcgtcccggtgcgtcctcttccagcgcggctctcgctcatcgccgttggcacatcgcatcgcgggcttgagggcagagcatccagaagtgacgctgacactcaacgcgcacgtctctttccctctggtagaacggccaaacagcaaccgacacgatccaggcgctgcacagcacgacctccgccatcatcgccctcatcctcacacacctcgccctctccccgctctcgccccaccttccgctcccgaaaccctaccccgcacgcgggctccgccttccgccgcgggcactcaacctcgccgagctccagcggctcaaaaggcagtttgagagcatccaacgcgagggcttcaagcgtggcgggcagggcgtgttgcgtgcgggctggggcgaggaagagtgggccgaggcgtgggttcgattcctcgaaggccagtgggggacgggcgattgatgcgcgttggcatggagcgtaccagaggggcaggacgcgaacaggcggaaaagacagcgtgtgcagggtggcgggcgactgctgcagagagtaagtgcactcaggctggctcctactgcgctggaccatgccggacgggtggtcatgacaaaaagcgtatcgatacagttgcagtcctttccttgcaagtcaagcaagcgagacccaggaccctcgtctccggtgcgggagggccttcgcccatgctccgagcgagcgacggccaggctaccctttctcctcagaccgatggcctaccctaaggcgcacaagggccggcctactcgtcctttttggacggcaggtccttgacgagcgggacgtccatctggtcggcccgcttgtccttgtctgggccgggcagggtgcggacctgcaagcgagagagaggcctccccagtcagcgcccgacgaacatctcttcaaacttagttcagcgccgcgacagagacgtacctcgtccgacttcatgtagttccagccgagcgtgccgaggccgagcgagacgacaaagccgagaaagacaaagagtggcgtgttctcgagcgggacgttgagacgagcctctgagcaagcgggcggggcaaaggcaagaggggacggtcgtcaacctctctgtctttctcgcgagtcgcgtgccggtcctggccaaacgataggcgacagctgtatgccgtcacccgggctgctccagagcccaaaagagagaggaagggaacgcactctggccaggaccccagcgctggcccgaggcgtggctcgagtgcgcgccagcagcgaccgggtcaggcaggccgtcggtcgtcgactttgtcgcgcggcgcgggctgctgaccagcgtccgacggctggcagcggcaggcgtgaggcggagggtaggggcgaggcgggcgagcatggcagaaggagcaaaagagaggggtgatggttctcggcaccggaggacgagagccggagagcgcgtcgtcatccagcgcagggttacgcccagagttacgcccggccgtaagtggctgttacgaccgcgcgcgagaccggtcgaggccctttctccctctcggcgttcggctttccctctctcgcacgctcaccctccagctcatctccgtcctcgccatgttcatcctcgtacgtcagataagagggacgctgtagctatcgaagccagtgctgacctctcttccgctgccgctaccagaactggttcttcgacgtgctcgcccagctcggtccgtctccctctctcaccctcgctcgtgcaccacgcgcgccccgtgccagcacgcgcctcttcacctctcctcaaagctcgctgacctcgcctccctcgccttctcatcgcagggctcatgaacaagaatgccaagattctgttcctcggtcttgacaacgccggcaagacggtacgttccttgtttctgatctctgatcggccgacaagagcaacgaaggagcttgcctcgggctcttctttgctgcgactcttgcctgctggctgttcacgttcctcccgcagctcatcgctccggatctcagaatgtcgcccgactgaccatgatacccgctcgtgtcccagacgctgctccacatgctcaagaacgaccggctggcgacgctccagccgacgctgcacccgacgtccgaggagctcgcaatcggaaacatcaagtttacgacgtacgacctcggaggccaccagcagggtgcgttgagcgtgcgcgcggggcttggacagtctgctctcggaggagggaggaggagcgagatgctttgggcgctacacggctggagctgaccagcgtgccgtccctttcctcccatctctcgctcatgtcaatcgcctccgcttgccttgcctgtctacccgaccaacagcccgccggctctggcgcgactacttccccgaggtcgacggcatcgtctttctcgtcgactcggccgacaccgagcgcctggccgagtccaaggccgagcttgacgccctcctttcgatcgaggagctctcgaaggtacggttccttccttccctcttgcacttgttgctccggtctctcctacatccgacgcgtcgctgactgcctcctccctccttcccccttcaggtacccttcctcatcctcggcaacaagattgacgctcccggcgccatctccgaggacgagcttcggcactcgctcggcctctatcagacgaccggcaagggcctcaaggtgcccctgaccgacatccggccgatcgaggtcttcatgtgctcggtcgtcatgcgccagggctacggcgagggcttccgctggatctcgcaatacgtgggtctcatctgcgcggcctctgccggtcgccctccagggctcgtccgacaatctgccgcagacgtgtcaactgacgcctacctcccgccccgaccggctgcagatgaactgaagcgctcgcaccctgcttacgcttcccctctcatccttgactacgacgccggcctcctgctcccactcgcttccgcaccagttgctcgtccctgtcgcgtgcgcaaacgaacctcggtcgagcctcactctccgccgaatcgtgtttgttctcctgcccgcccacacacccctttggttcttccccgtctcttgcctccgaatgtgaaatgacaactgaacgctcgtccctggcccttcgtgtctcctcttcaacctaagcgcgactcgccacatgtgctcagcttgctcagaggagagcgagcacataagcaaggcagaagatgtccaagccgaaggcgaaactgcgagaagctcctggccgcaggccaggaagagcaaaagaaatgtgagtgcggcgagaatcgaactcgcgtcctcagaatggaaatctgagataataaccattatacgacacacccctcgatgttagtgttactcaaggctagtatatatttctttttgctgacctcgaacgatagaatggcccgacagacagagtgactggcgcgtgaaggcggagggcagccgcgcgaggttccgctgcttggccgatcttcgacggccgcgtccacagcggatgacggtgtcagcagcgccaccagttgtcaaggacggcacggcttgagtacgttggaaggcaccctcgatcgggagccagcagggccactttcttctttggcgatagagagtgcgagattgaggcatgcattgaaagccagcggtggggaatgaaggggattacaaggcgagccgcgcgcggaggccaccggtgtgcgacgaggagacagcaaaggggggcaaggaagggaggtgcccggcacgtcgacgagtgtaggagagagcgagaggacccagagaaggagaggcagaagggacggccagaaggagcgattactcctctccgatcttcggcctgcagaagagatgggcaattgagggtcagttctgaaggagagcgggcgtgctctggctggagggaaaacgtacgcaaggtagtacttgatgtagccctgctcaaactcgaaaccgacctgaggagacgcggcgcgggtcagtcgatgatagccgccgccatcatgagagacacaaaaccagcacgcacgagcagcgggatttcgttcatgagctggagcgagaccttggacgcgagcggggccgacttggcgaagttttggaggtacttgagcgagaaggtgagcgagacggcctgcgagagccggatctggacgccaatttcctcctcctcgtccttctgttgaggcggcgggatagcgagcgggtcagcgaaagctaacaacagcgtgccaggccagccagattgacggaccttcggcttcttgcccttcttcgtcgggctggccgaaccgttcgccgtcttgcgcttcttgagcgccggcttgacctcatcctcgtcaatctctgcgagagggcacaagggcagagtcagcgaacacacaaagcgcaccgcgtcaagcacggtcggacggaccgatctcgctctcgtcggccgcctcctcgtcgtcgtccttgacgacctcgtcgtcgtcgtcgtcaatgtccttcttctccgtcttgaccttgacggcgtcctcgtcatcctcctcgtcgtcctcgtccttgacctcagccttgatcttgccaacgctcgtcggcttgaggaagacgctaccggcgccaatctcgccctcggccgaaaagcggacgccctccttggtcacctcgatcttgaccgactcgccgaggaccgtcaggtcacggcagatcttctggaactcgcccgatgacatgacaacctcggcatcgtacgacgtgtcgggaataccgaggtgctcctggtcaatgtccatcagcttgatctcgtactcctgaggaagggtgggcaggcggtcgcggtcagccatggcgagatatgcgattgagcgccgagacggccgaagcagacacgcactccgacgcggtcggcccctgatgagatcgagcagacagtcggtaggaagaagagcgtcagccttgtgctttgctagatgtaggccagccagccggccagcccaggcagcgagctcggggcgcgacgcacggtgagcctcaaacatcaggccgaggctgtcggcgtcatcggcagccttgagcgtgacaatgtccgagtcgttggcgcacttgaggatcttggtcaatgaggcaagctgcgagcccgatgggaggtgggacgggatgggcgtcagcgacgcgtcccttctctctctgcccgcgcgggcaaaatggcccggctcgagagcaaggcagacagcggacggacgttgatgccgagcggcatgctccggtcgcagcggtagttctcgaagccgctcgccttgagcatgaccgagacgagggcaacgtgcgagttgtccatggcctgaagcgactagttgagacggatcgccgagcgggagagacgcgttttcatcgcggtaggggagcaggcggccgagctgttagccgaagcgcagacagcctaggtcaggtcaaaccagcgagcgcagacgtacgatgccgtcgtcgttgcactcaaagtttgcatcctgaacgagctccttgacggctgagggcaaggcgagcgggacgttgagggacgatcgtcagcgcggtgggaggagcgaggtggtcgagaggcagcaggcgggcggacggaccgtcgagcagcttcttgaggatcgaggcctggttgagacgagcttcgagcatggctggagaggcaagagtaggatggacgaggaagtggaagaggtcgtgtagctcggagggaggtgcaagggatggtggtgggcagggcacgagtgggaaatgagctctgcccgccgagccgacgcgccgacgcgtttcgaccgcggcgggactacaggtagcgtcgacgagtcgtcgagcaacctcccgaccctagtcaggcgaccgcgatatcagtctccagtccggcttcagcgctgccactgccaagaagaaaaccagacgacaagaggggatcaggggagactgctggcctccgggcctcgctcgacgtgacttacgcccgacagcgtaacagttgacacgactcgtgcgcgctgccctttcatccttgtcgcatcagcaggcagatcgtttccttgggcctctgagagactggtagcacgtctggattaatcgaaagcattgctgattcggccaacttcgctcgccctcaccttgtgcaatgagtggccgtccctgcgctgatcgccgtaagcacgcgctgatcgcaacccccgcctgaccgaaataagtcagtcgagcttaatggcccggtgcgcgggagaaacgagagtaatccgatcgatctctgatctccttgcaggctcaacctgcgtaggtccaggacgtctcgagggtcgtcgcctggctgctgcagtgcgactgacgcgcatgcgcgggtcggaagcaggaagcgcgccgcgcagcaagccaccctgcggcctcctctcaagccctcgagcttgagagtcaggcttagggggggggaggaggggcaagagagacgggcgatgcgcaggcggcggccgcccttttgtattttttctcgagcgactcatttaacccggcgatgcgtactcttggacgccacttgcaaaaacacagatcttcagatcaagagggcgagcaaaaagaggaagcaggaaggcacaattggaagcgaaaggagtctgcagagggcggccagggggtgggaaaaaatgggctgccggcgctgtagccgacaggtgagggcggccgatctagtacaaaggtgagaccgaagtcggttcggaggggaggtcggaaggggaaaacaactccagacggagggagagatagatggtggaggtccgggaagcgagagtcgaagagagatctagcggcgggcaggcgggcgaccgacgataaggtgttccggctgcgcgcacgactgcccgcttgcaggcaattagcgcagacagaggagcttaaagcgacttgcgcacgcctagtagccctcgccggcaagctcggcctcgagcgcagcccgtccggcaggcgtcagccgcgcacggccgtcctggtactgtttgcaacaagggagaggcaaaacgggtcagcctcacagcactctcgacaagcaagcggagtagaaggggacgcgcgtcggtcgagaagtagcgcggctcgaactcctccccgttggccttgcgctcagctgccttgtcgcgctgggcctgctcgatcgcctgcttactcgccgtcgcctcgccccagctcttggcaagcatcttgtcggtcacgtcctgccagaagcgccggctctcgtacgcgtcctgcgagtcaagcggccgcaccgtcttgggaactagaccgagcacgtccaggtcaatcagcaggcgggactcctacgagatataaaagcgcaggtagcgacgagtcagctttgcattggtttgccgcgagatgagaagagccgaggggtcgcaccttcgagcccttgggcttgaagttgatctgcttgcgccagcagccctcgagcgtgccgacaacctggctcgacgagacgtccttaatcttgctatagttctcggccttctcgtcgccggccgcgtacttgtagacgacaccttcgagcaggaaccgggccttggacacccaagactgcgggacaggcgggagagcggatcagttgcagcgctttgggaccggcgatgagtcttgcgacagctcgcacctcgtccttgaactcaacaatggcccggtacttctccttaccgtcgcctccacggcaggtcacagtgatctaaggaggccgagaaagcgatgaggtcagtcatggatgagtcgcgcagggctggcaggggcggtagacgaaccgcgtccgagatggtgccgtaaaacctgttcggagtgagtgcgcagggcagatcagtctactgcccctcgctagcacttgaaggatgagtcaggacgcacgagcccttcagcaggccattaacgttggcgcaaggatttgagatctggtacctgtaatcagacggcgagcagtcagcaatgtccagcgtgttgaacaagtctcaacgggctcactcctcgcccttgccaggtccgtcgcgattcagcttgatgaaggtgcccttgttgaaggagccgggtgctatccggacggctgcagcaggggtcggcgaaggggtcagcgccaaggtccgatcgcgcagacatgtcggatagaacgcactcatgcccgagacctttgcgctgatttggtcgacctagatggcgcaagtgagggctcgggacgtcagtgcctgtggtctggacgcaggcgaggcggattgatgtgcaagaggaggccgagtactcacaccgtacgcctcgatgcccttctccgggcaaaggtagtaggccgacgagatgggcgggtggtgcgagacctgctcgcactatcggtgggcacgagggagaagcgtcgaagcggcagaattatcagccgcgctgaccccttcacgagacagacgccgagcgaacgcacaaggaacgcgaccttgacaggcggtccggcgttgatgccgccggccgtcgtcgagctcgacgaagcggcgtactccatgctcgccttgcctcctccggtccgattcgacgacgtgctcttcccgccgatactcttgatcgaacgcgcgtcagagtcgggctcgctcggcgtccggacgccagcagcattgggcgtgttgaagccgctgatggccgggtcgccctcgtttggccggtggtggtgcgtaaggatgacgggctccttcgtcgccgggtcgacggccgatggagggacggtccagtggcagcggaagtgctcgcctgcgcagagacagttgcgtcagttatcaggagactgagcgatgggatggcgagcgagtacgtaccgaggacagagttgtacggtttgcataccttgccgcgctacagtgtgcgaggtgaaccgtaacgtgaagggtgtcagcggcgttcgccaagctgatgagcgccttgaagagccgtgcgcggcgcagggacgtacgacaaacttcagctgaatcgtgaaggcaaagcgaaggacggcgagcatgcgctcgagcgggtcctcggagtcgccgactctgcagcaagcagacaaagataggttcagcactcgaacagcgtggcgctgcgactgcggttggcgtcacgcacgagatcagcatctgttgaaggcagacgcgcgagaggggagacgatgagatcagtcatgacgagcgcaaggtgatctagcgcgagagcagctcacgtctgcccggtcgccggcagctgagagaagcagggaggcaggccgtccgtcagtcgatgtttgcagacatcgtcaagcgcaaggtcgaagctcccacgcactccagtactcgagattcggtatcggctcactgaggagaggaggctggcgtcagtgcctggctcgcagcgagctcacgagaggccctgtgaaggatccaagtaaggtggtgcgagccaacgtggcttacatgagagaggctgggagcgagaggcggctggatcaggtaggcgggcggagctcgtcagcggcaggctgagggagctgagccagcctcgagcggaaggggccagcggacgcacaggttggcgaggtcctgcgagagcacggccggatccatcacgggcgagcgagcgccagaggaggcaaagaggagggagggagcaggtgcagccggagggttcagcctctcctgcaggccatcgcacccgaagctctgacccaacgaagaagacaagcaacggaccttgacgcccatgaacttcttgaggaggccgacaatcatcttgagcttgccctcctcgctgccgccggtgtcgttgatggccggaggtggggctgaacaatggagacggccggggcaatcgttcgaggcaggcgtcagctgcgacctcttcatcgccttcgtgcaagggcaggcgggcaggacggaccgtcctccgggacgtcgtctccgaccgtcagcggctgctgactgactgctttctttgaggacatggcgtgggctgttggcgggtagctgatggtgaggaggaggtcgggctggcctgcaggtcggcggcgggccgagctcaggcgtgggcgtcacttgcccgagcggagtctgaacctcgtccgcccggcggcgatcagctgcgacaggcgacaggcggcgacaaagacgagcagagtcgctttcacaccacgacggagcagctggagagacgtggtcattcatttagagatctaggttgtcgtgtctatggtggtggtacaagcaagggttcgcgtcgagagggctcaggcgctgctggcagaggcgctgacgctcgacgagtagatgaccgtcgacgaaggcagctcggcaactgcggaggacggatcagggccggtaaaggtcgacgtggcgttgtcggcaggcaggtcccagaacgagacagtcgagttgtcggaggacgaggcagtcgagttgtcggccatcgtctcgttccaggccgccgaggcggtgccgttccagagggccgtctcgttggcgacaacgggtcaggccgacgccgagggagtcgcggcagcagcggcagccgaggagaggtaggtcggccgtccagcgcgaccgactgagagcgcgctgctgacgatctcctcggggatggcgtgcgccgaaggctcaggcgcgacggtgatgatcgactcggtcgcaaccggcttgaccgaggacgtgccggggccgatctggaccgaggacgagcccgggagggtaaaggtcatcggctcgaccgagggcgacgacgcagggatgtaggcggcaggctcggtcgcccaagcggcgggcgggccgtgctggtgcgcggtcgtcgaggcctcagcgacagaggtggccgaggcgatcgcggcaggcaccgaagcgacggcgtacgtccactgtccatcggactgaatgaggtagggaggagttcgcgtcagtgctttgacctactgggatgacagcggaagcttgaaaataggacggaccttggtcggaacgagcgtgagagtgatggtcggcaggatgttgacgaggccagcctcgcccatcgcagcgacaaccttgccaatcgcaccgccgacggcagcaggcgaggcgacggcagagtgcgtgacggtgacgacttcggtcgccgtcgccgtctcggtcgcgtaggccgtctcggtctgcgtctcgtaagccgtcgaggtggcgacagtcgtcttgtaggcagtctcgtaggcggtctcgtacgcggtctcataagccgtctcggttaccgtcgccgtccagtactcgacggccgtcgaggtcaccaggacggtcgacgtctcggcctcgccagccgattcgaccgggccgatcggaatgatgagcgtcccgttggcggtcgcgatcgtgacgttggtcgagctgacgttggctgacgagacggggacggcgaacgtcgcgttcgggcctgcaatggtgacgttgccggcgccgaagtcgaccgaggtcgagttgtcgaccgcgagggcagccagaggggcagtcgacgtcgcgttggcgtcggcggcagagggaaccgggagggtggcgttggcgacctcggtgccgtcggcgaggaggttggccggtatagcgacgatgcgcttctcgagggcgagcgcggccggcgcggacgagagcagaagcgaggcggcgaggaccgaaggaagaagagagagcattgcgagaggttgcttgagggcggtgaaggagtgactgggagggctgctgagaagagtgtaccggaccggccgtgtactgcgaagggctgagaggcggagacggaaggcgaaggcgaggctgaggctgatgggaggtcagccatctttggcgcccgagctcgtctgctcttatacctctggccgaagcgaaggagcggcaaagattctgctccacaagggcagtacaggtcccgagaaggtcagcgatgatcagacgcgtcggcgtggtgttgttgaccggaagcggcggtggatacaagagagacgtcggtcgggggagcgtggcggcggcgcgaggcgaagaggcccaggccgagaaacttaaaaaggtcgtctggcgtttctcacccgccggatgcggcggcgcgcgcgcccgaggcgagaaaaggggctagagaagtgagccggcggcaatggcttgacgcgtcgacggccgcctatcaaggtcaggctgaagtacgtgaagggataggaccaacacgtagacggctactatcaccgcctgctgctggttcttatcaggtactaccggtagtcaggcgtccggcagcttcggctgagcggaccctcgagctcctcgcgcagcgcgacagcgcgcctcctctcgttgggctctcctgtcgcccgcccatcaacacaagccgtcgtcgtcgaccagcagctcaaccgctgcagacctccagctacttgcagcaagtccctctcatttcaaccctagctctcacctccatgtcgaccgccgccgcaccgcctcgggcaccgcccggcctacccccccgcccgactcgcctcaaccggctgccatcgctcgagcagatccgagccaaggtggctcctccaggtgcgtcgagccactgctcagcctcaacatcatatgagggtacccttctaaacctcatcggcttgcatcttagcctcatcgcatgcttcgctttcgagtgacgtccggctgagcgtctcgctgccagctcggccttcctccgccccaccgccggacggcccggctctgcgctcgctcctcggtcgccaccctccctcagtatcagctctgcgccacgccagcggtcctcgcccaggcatctcgcccatggtccagccgccgctcgcaggtcggcgggcatcgtccgtcaccggcccgagccttcaggccatccgcgagcgggtcggcgggtcgaccatcgggaggctcacggctcccagcccgcctcagatcaccgttacgactgatggacagcagacaaccgacatccgcctcgaccagaaggggtacctctcgggccaggaaagcctgccagcgacgtcgattgacgaggacgaggactgggcgcggcagctcaaggaccaggacctgcctctgcagcacgtctggtcagtcgccaagcccactcgttcgcccggatcacgactgaccgacagttcaattcgcacaggtcctggacgtacacgccgccgatgtcatctcacgcctcgagctcggccgacacgtacagctcggctttcgtcgcgctcggagagctgcacacggttcgtcctttccttgcctaccttcctctcctcggcgcccatcctcgcagacaacagctggctgatatctcaagcaacaccttccctcacaggtccaggactgggccaagcacgtcaaccacattccaccgccgtcgtcgctggcaaagggggccaattacagcctcttccggggcggcattgaaccggtttacgagggtgagactcgccgtcaagcgctctcgcggccgagaatgagcgcccttactgattttcgatcccctcccagacgtccagcacaagcaaggcgggcggtgggtcctgacgctccgcgggctgtcggttgagcagagcgcggcggcgatcgaccgctgctgggccgaggtcatgatggccctcatcggtggcatgctcccgaccgagggagaagtcgcgtgcactggcgccgtcgtcggcatccgccaccggggtgaccgtcttcgtacgttccggattctgcaagggtgctcgtcttcttgctgacgggtcccgagcgatggcccgcctcgcagagctctggacctcgacaaaggcgtcagccgcgcccatccagtaccttggcgagcgtctcttcctgcttctccagcagacgctcgaaggcgtccgggtaattggaggaggctacatgctcgactttcaggtgcgccgctgacacgaggtttgcccgtcgcaagacgctgacaatcatcaatttctctctcttacagtccaactttccgacgccgggaggcaacccgcgcatccgaggctggaacagcgacactggacctctgctcccccggaatgccggttggcgttagattccgcgctgcaggcatgtgactactgcccgcccatcaagggccctcctcgctgacggccaggacgactcattcctatgaacgctcttcctcacgaccgtacaacgacccgccattctcctgtatcactccggacgacgcccacttctcctgcctgctcctgtatctcttctgctccgctgccgagcaagcagctgcttgcgtcaaccctttccttctcaccctttaccctgctcgcttcatacctcttgccgcatcgcgacacctatcaatatcactatcctgcttattctccctttgtccgactggccggccttaagcctgtcaacgggtcatgtcggccgctgcgcaggctggagtcgcgccgcgggaacggctgacgagacgccggtcggtcgtcccctccgactcgacggcgtcagtcatcgactctctctctcttgacctccatctcgaccaaccagaaccttgaccagcaggcatatcctcgactcggtcctgctctgcctcacaacagcgactcgctggatcaagctctcaccgcggccgacatgaccatcaagccctcgcgcgtggtccagaccacgcccctcctctgcggctcgcgacccaacagcggcagccaggaaggcgccgtcgccaagccggcggcggtcctcgccctccgaggcgagccaaagagcgatagcaggcaaggcgaagcgtccggtcagtccctagcctctcgacgggcgctggttgggtcggtcggcttgacccggagctgacgacagctcgttccctccgctgctcgctcctcgtccatctcgttcctcgtcttggtttctttcgccaggctccaagccgaagctcgaggctcctcagccgatgcccttctttggcggaacgatcatcttcgtgcccaagacagccgataggccaccgattgaggccggccgctcgacctcgtcgttcgtcctcccctcggccgtaccgacgccggcgccttcgcctccaccagagtcccggaccgagctcgagctcaagtgccacgtccgagcacggatcccgacgccgcatggccacgtttttctccatctctacaaaacgaaccaggacgccaaggagcacatggcgatcgtctttgacccggcccagatggacgacggcgtctggcgcaaggagcacattcgctcgcgttcgctcgacgagagctggaaggctggcgagaccgacatggagcgcatgatccggggcgcctacgtcggtcgcctgaccgagcagggcgggacggcaagtctgccgccggccgaggcggctgcgcaggcgacgagcggcgaggcaacagcgtcggcaacgagcagcagcagcagcagtagcggcagcagcagcaatggggcggccgagccacgaacgcacctcgcgcccctgatccggatccactccgagtgcttcaccggcgagaccattggctcgcaccggtgcgactgcggcgagcagctcgatgaggcgcttcggctcatctcgctcccgacacgatcgccgaccgacccgtcacgctacattcccggccgaggcgcgatcgtctaccttcgacaggagggccgtggcatcggcctcctgtcgaagctcctcgcctacaacctccaggacctcggccacgacaccgtctcagctaatatcgcgctcggccacggcgccgacgagcgcaaatgggacattgccggcgcaatcctccgcgacctcggtttgggcgaggccgagcaggagcggggcgtccgcatgctcaccaacaacccagacaaggtcgagggcatgaagtcggagggcatccgcgtcatcgagcgcgtcggcatgattcctcgctcgtgggattcgtacccgcacgcaaaggacaacggctttccggcgacgccgtcaaacgagtacccgcacaccgacacgccaccgctgagcgaggcgctcgatggccagctccatccagacgttaaggagcgcgagcgcgagcatgcccaatggctcgcccgcaagagcggcgtcggcatgattggcggggccgagacgaggagcgacgagctcgaccggtacctcaagaccaagatcgagcgcatgggccacctgctgtcgcttccgccgggcggcgcgcgcgagtcgtgaatgagcatgagccctcacgagcaacatgtgatggctgagcgcacgttagcagacgactcggtggcagcgtcagacagcttgcaggaaggcgaggtagggcggctgctgggcaggagcaagtgccttcaggcacgcacccacgccggacgagctgctgccgccgccgccgctgcgcgctcgctcccctctcacggccatcagttcgtctccccctctcagcagcagctcacagttgtctcaccccagccagcttcatccaacacgccacagcatgcgtcggtcaacccagacagtgagtgctctggcggcggggtctgtccgtgacgagcgcaggccgaagctgacccgtttgcctgacccgcttgcctctcgcctcctgccctcgccgccacctctgctccagctgcagaagcgccagaaccgcctgccggtcgagctccagctcgcgatccttcgcgaggccagcatccaatccgaacaggaggtcgacggcaagaggcggctctctgagctctgcctcgtctcgcgcgactggcgggtgcgtcgagctgcatgctgcacggtccctttgtccagctctgaagctgacgcccgaagacgccgctgttcctcctgacaggttgagggccagcgcctcctctaccgatcaatcgcccaaactcgtcggaagattccagacctcatccgcgacaagccgcacatcgcagccatcgtcgaggaaatcgacatgcgctacatgacgttccgcaacatcgatgaagtcgacgccatcttcgcccagggtagccggcttccgatgctcaagatcctcaagaaaattgtctggacgtcgaaggtggctgcctcacttccagccctgctccccattcccgcccttcggtcactctcgatccaggacaggccggctttgatcgctcctcccctcgttccgcactctaacccctcggcgctccaggcattcgagcgggcctacatattcggctccgctttcgacccggccgacctcgccgcacttccctcgacgatcactcgcctcagtctccgcggctttccgccgaccaatttcgggcccgtgctccaggcgatcggtcgctttgtcgacaccctcaccgacctcaccctcgcctctcgctccgaggcggccacctcctcgctcgagcttcctgtcttgccgaagatgcagcgcctgaccatcgaccatcaccagactcccggcgtcctcgacaccgcgcagccggctttcactgatctcggactcatcttgtcttcatacgagttgcagcccgcatccgacgttgcccatcttggtaacgtcatcagagaccaccccggccgcttccctgctctccggaccgtcgtctacagcgttaagtacggcggaccgtcagagttccccccatgcctgcctctcgatcccgacaacagcttttacaaacggcgaacggggcagcccttttcacccaccgggctacagcactccgggaggtcggcctcgccttcgttgacgagctcggcatcgcctggcgggaagagtgggaccctggggagccggctactgagtttttgatgtgaaccttgaccatcattctggcctcacatgttccgtctcggtcgggcacctgcgttccctcccctgaactcatgaacgactacttgactgtccgttcccagctcaagaaagacgagaatccaggcgagacggtcagcgctgatcgaagcccgatgaaatgcgcgagcagagactcgtcagggcgattgcagttcataacaaaagaggagacggaagatgcgtgccgggggtcgtgtatgagaaagaagaaagtccgtgtcggagagaggagcagaattctgaggctgaaggttgcagcgacgtctcaagcagatgccctgtctgacgttgcgccgtaattgccccgaggccgggcattgtcgacctcgctgctcggctcggcgacgatctcgccgtagagacccgggtcctcctcgtcctcgcgctcgacggcacgcatctcggccagccggcggcgcatcgccttctccgtcttggtcggcggcacgcggcgggtgatggcggccgcgacgagcgcacagacgccgccgaagcgcaggacccaggcgacgccgttggcctcttgcccgccgcctccacctccgctggcgatagcgaacacgtcggtcacgagcggcgcgtgctccgaccctccaccgggcgatggcgccgggtgcgacgcggcgaccgccttgaaaatgagggacgagacgatggcaacctgcaagagatgcagacgatcagtcaagatcgagtgacagacagaaagcgagaaggcgcaccaggaattgtggaaagacgatggagaggttgtggatgccgagcaccgacccgccggcgatcgggcctttctggccgctgtccatcctccgctcgccatcctcgtgatcctcggtctcggttgtgttgatcatgctctggctgcgcttgagcaagtttgagcgttcggtcgggagcttgggcagggccgtagtctggtccgtcatccggccgggcgtcgatgccgtccgcaggtgaagccgcatcggccgcggattgaggtcagcctgcgggtgcgtctcgatcggctgctcggccacatcctgcatctctttgaggtactaggaggatcgagcgtagagggcgtcagcgaaagttccctcgagcgagtgtgaggcacagcgcacctccatgagcagcgagaagggcacccaagacgcgacggcccagcagatgccgacgagcgagatgagaacgctggcctcccaaaccttcgtgacgaagaaggtggcaatcctaggtgatgcagcaggccggtcagcactgacagtgagtcaggacgcttgcggaacagagcaactcacatcaggaccgagaagaggacgagcgcggccgtccagatgttgcgcaacatgaacggcatcgtcggcagccggacgggcttgccctttgggtcaagcttagcctcgagcttccagccctcgaccatcgccttgatgcgacggaactcgcgctcctgctcggtctccatgccatcctcgtcgtcgtcgtcgtcatccgagtcgggcgccagaagccgacggtcgcgctcagcgagatacggcagcacagtgccggcgatgacggcaactgcagagctcaaggcgggtcagtcagcagagcaaacactcaagaagcggacagggcgccactcaccgatcgagtagaacagcatggccaggctacccgcacgcgctccggcatccttatcgacggtgcccttgccctgccggcgttgctcggccttcatgacctcgagcacccaggtcgtgctatagaacaggaaggggaactgcatcaagcatgggcgactggagtcagctttgtccaaaaaaaatccgagagggcagatgctttgcgcggcctcacccaagacatgaaggcaaaaatttggacgtagcagacgcgccggatcgggcgcggcaggtgccgagcgaccttgaacaggttgcctgcgatgtccttcagcttgctgcagtcgcaagcgaggttgggtcagtcggggcaaagggagggtggcggcgaaagtgagtacgcacgttggccgctctccgagctcgaggacacgcgcgacttcgaccgtcgtccagcaggtgagccagacagtcacaccgaggatcaagatgatgaccatgcaaaacttgcggaattggccgccgccgagccatgccaagagcgggaaatgcgagaggtcgaggaagccgagagtgaagccgacgctgagtgaagaagaggaggaggaggtcagcccgtgaggggtcagaggagaggagaagatcggacagaccagttgccaaggtgggtcatctgaagaggagcagtcaaatcagccatgagctagtcggatggaggtctgagcgccgacgtacccgaccctgccaggcgttggccgacgaaagctgctccgcaggcgtgacatcgaggagcaagttgcgcagactcgcttgctgatgagtgaaaagaaaccgttggatgcagaactatcagtgctgctccttcgagagaccgcgctgacggacgaattgacgcaccagcgcgttgaccgcgaagtcgaggccatagaagctggcgacggcgacgccgatcgccgcgttccgcgcctgttgccgccacgccgggtcccagtcgccttctttgccaagctggcccttgccgctgccgcccgtcacggaacagatgaggtcggcgatcgttgcaccgagcggctgtgcaaaagcgagcgcgagggtcgagagcatcatcacgagcgtcgccgaggcaatccagaagcggcgtctgaagcgcgaggtcgacgaatctgagatagcgcctgtagggaagcgtccagagcgaagcgagtcagcgccgagtatagacgttcgaagggagggtggaagagaacagttcagagatgacgtaccgatcagcggctgcgtgacgagacccgagatgggcccagcgagccagacgagcgaggtgagctcctcagagagtccgagagcctggcacaggttccagggtacgttagccagggccaagtgacacgcgtgcgagacttgacgagagtgcgcacaagaagctcctggttgccgaaactgcggatggaacgacaggagaggtcagtgtaagcgataggagcggtcagagtaaggccagctggcttcgacccaccccatctcaagacaccaggcgacttcagcaggtagagaagagcagtcagcggtcctgagcgagatgtggctgaaagcagggccgccagagacgtactctgcgcgccgcccatgccggcggttaggcagatctgggtgcagttcggagttcgtactgacgtcagcccggagcgcaaaacccagactggatcctcaagggaggccagcgaggcgaacgcaccatgtcgagcgtgctgagcttccgcttgcccgccttctccgactcctccttgccgaacgaggcgtcccgaccggagccctcacctccagcgcccggcacaccggcaccctccgcgtcggcctcttgcgaccagaggtgccagccattcttgcggtcgccccggtcgaccgccttgcccttgttggccttgcgcagcgcagagagcgacgtgtactcgtgcggctggccgctgccgcgcctcgagccggacgccggcgagcgaatgagctcgtcgccctcaccgccttcgaagcggcctgcaagagggctgccgggtgccgaggacgacgttggagagtggttgaggaggagcgagacccgcttgcgtgagggcgtgctcgggcgaacagttgcagacgagccatctcctccggctgaggcagcggcagcgccggcagcaggggcaggggtggtggcggcgacggcggcgtaggttggaggcccggccggcttcgccgactgtccgtcggtcctagcgtccatgctgaatcgagcagggtcctgcagggcagagggcgggttggagagaggcgagtcgtggtgagaggtcagcagcagaaggggttgtctccgcgcgggtcgcccgcgcgcatgaggccgacgtcttgccccgcccttgcgcgcctcccggcccttttccccgcacatgcgtcatggctcgcaacggccaccttcacgccgatttgtgcgaacaggcatggcgtcgcattagaaagcttgagctacagtggaagatagtcgcaaacggcgaccctgaagaaccctacccgccctctctcccgccgtcctcctctctatctgctctcctcgacccaggccgaccccatgaacatcgtcaaggccgcctacccgccgcccgacgtttacttcaagcgcaaggtcgccctcatctcgggtccgtctctctcgcctcgccacagccgatcttctgaaacacctgcttgagcaacgagcgctgaccctgcccatctgcccttcgcccttgattcttaggtatcaccggccaggacggctcgtacctcgccgagctcctgctcgagaagggctaccaggttcacgggtgcgatccttctttccttgctcgctcgcctctctcaagctcgacgcgtcctcccgatccggcgcgagggcggcttcagcccccggacgcgaaccccgcgttcgactcttttgctgaccccgcctttgctctcgctcgccccgagtgctaaagcatcatccgccggtcgtcgtcgtttaacactggccggctgcatcacctctacggccagaagaacctcaagctccactacggcgacctgacgtgagtgcccagcgggtcgcaggcagtcagcgcgtcgcccggctcccgatgccgcctgttcgccgtgctgacaacctctcgccttgcgctcgcagcgacacgaccaacctcgtctacatcatttcgcaggttctcgtacgtcctgcgtgcacacgacttttgcagtcgctgtcaagccgcaagttgactctccccacgtcgccgacccgcagccgaccgagatctacaacctcggcgcccagtcgcacgtcaaggtctcgttcgagatggccgagtacactggcgacgtcgacggcctcggcacgctccgcatcctcgacgccatccgcacggccggcctcgagaaccacgtccgcttctatcaggtgcgccgctcgtttctctcccttaagccagtcgccagctgctgatcaaccctcgcgcttgtaggcctccacttcggagctctacggcaaggtcgtcgaggtcccccagtccgagacgacgcccttttacccgcgctcgccctacggagtcgccaagctctacgccttctggatcgttaagaactaccgcgagtcgtacggcatgtacgcgtgcaacggcatcctcttcaaccacgagtcgcctcgccgcggacggaccttcgtcacgcgcaagatctcgcgtgcggtcgccgagatttcggccggtaagaccgagacgctctacctcggcaacattgactcgaagcgcgactggggacatgctaaggactacgttgagggcatgtggcgcatgctccagcaggactcgtgcgtgccgggccgctcacctctcctgtctgacagaacgcagtcggctgacctcgcccgaccttgtccgccgcttgcgcaggcccgacgactttgtccttgccaccggtgagacgcacgagatccgcgagtacatcgagctcgcctttggccacgtcggcatcaagctccgctgggagggctcaggcgtcgacgagattgcctacaacacggccaacgacaagcccgtcgtcaagattgacgagaaggtgcgtccgcccttcgtcgcgttcgcgcttcagctgctgacctttgaccgtctcctctccccccccccctccccacagtacttccggccggccgaggtcgacctcctgcacggcgaccctgccaaggctgagcgcgtgctcggctggaagcggacgtgcaccttcccccagctcgtcaaggagatggtcgaggccgacgtcaagagcgtcgcaaccccgcaggaggaccagaactagaagaaatgtcctcgttcgggcctgaccgtcgtccacttgtcctcttcctgtttcctcctctcttctctctctctccggtcgttcccgtagcggcgctctcacagcagtctggggcgtaggccgctggactttccaggacgcgccacgtcctggatctacatacccctcaaactggtccggcggcgatctcatgcgccgtcttttgccttcccgattcgaacgagcatctgcgctccatggctccatgaaagcgagtaggactgatctcggtcaaactttgcatcaaatctcgctagcgatttgggcctcgaacctatcaaaatgacaacgcatcagctcgaggccggtcagaatcctcgtctcgtcggacctacttcttgatgagaccgcagcccaagatcagattcggcgcaggggcatcagcgtggctggaggcaagagtggtcagcatctgcctgcctgctcgtccaggccgaggcttgcagaacgcacgctgcgaaagccgtcgggccgcctgcgtccagttcgcatcaggatcagcacattctcgtttgcagaccagaggcacgaaagaagacacactccaactctcaaacatgtggaagacgccgtcctgcctcagatcgcgcgacgcgcgccaggcgagcatgccgtcctcctctggcgcagtctttttggcgttccggagcacctcgacgaaggggtcgacgtcattcgggaggacctgcaggatgacgagatcagcggcgaaaaaaacggtgaaggtgagggctgaggacggacggtgatggtgatgaacaagaccttcagcgacaggcaatcagcgcgcgtcatgtcagcagccagcagaaggccatggatctcgctactcacaaatgggccggtcaggccgtttgggagttccatggcgcgcgattgagagctgtggcaggcggaagggccgtctcagcgcatggccgccgtccggccttttgtaggcaggaagcgccggaccaatgtcggtaagaagtgcccgtcagccttacggatcaaccggtcagcatccgcaatccgcagcaacccgcggcgagcgaagagcgacgagactgcgagtagcatacaaatcgagtcacccgggacatcggaaagaaaagcctacgatccatctggagacagaagttggacgggcgtcagtgatcgagaccagtgaattgatcgagctgtagtcatgactcacccaatcagcgtgcgctgacaatgcttgttactgctgagcgtcttgtggcggccgtaccgtgtgagctgccgtttggcggtccagtgtcgccggcgagcagcaggcagcgccggatgctcatccccatcggcgttcgcccgccgtcgaccgccgagccgtcgcgaccgggtgcctgcatgcctcggagcagactcgtatgcgcgtcgaggaagggcgacggatggaggactgggttctttggcatggtgttcgccgacggtgacgggcgaatgaaatggctcttgacgagcggcggcggtttgggtatctgcgacggcctcgaagcggccgccggggttgtcgcgtcgtctggcgaggtcgccgcgcggttcggatggctcgagccagaaccgttatagaatgacgagaagaccgagcgtttgacgccctcggctaggtcggcaaggctcgttgtactggccgagctggcgatcctccgccgaggcataccgctctcaggccgacccgtgttcgaaacgacagtcgatcggagggccgttaacgagtcgaccgcgctcccaccgccgccgccgactgtgctgccgaggacgccgccgcgatccgaacggatgctgcccgcagcgctgggtgcccttcccctcagcggcgcggccgaattgaaggagccaaagctcgccttgcgcaagtggccggcagccgtccgttcgtcggtgccgtcggacaagttgaggccctcggatccgcgcgagatggtgggcgagctcagcgcagcttcggtcgagatctgcggggcggccgcgagtgaggggtgggccgaaagcgaagatagccgcttgggcaggaggttgggccgggttacgagcgagagaagagacgacttggacgacgccttgcgcagctgcttcgggtatcgtggattgtgagccgcctcttggccggggcgagacggcgatgtgacaggttctaaactggacggcgacgacacgagcggttgcgatgccggagccggcgaatcgaccggcggctgttcgggcaggacgtcaaccggcggctgctcggggaggacgggttgggaggatgccagcgcaggcgatggtgcagcttccgactcggaagctggcggcgacatgacgggtccgttggcaggcggcgaagaggtcgtcgggtcctctgcgaacggcgagcgctgctgcgacgaggacgagcggcggtgcgacgatcttgatcgatgcgaggaggatgatctcgcacgaggatcagtatgagagggcgaaggcttgaggatagactgtcgtggaagggccgacaggtaagggagccgaggtcgcaggcgggtcagccgagcaagcgtctcgctatccaggacgagctgagcgatcgcacctcgcctccgctcttgcgacgccgacctggccgttcgtcggtcgtagctgccgccgtcatgcccaggcctgctgatctgccgccgcccttgccggcgcccatagtcgagagcgaggtcgacgagttggagcgagcatggtgcgagagccggcggcgatgcgacgccgtgtgcgccgtatggacgtgcggctgatgaccggtcggcatgctgtggtgatccgttcgctagcgcagcggaggcggatgaaggcgaatcggcggagagaatctgttctagagaagggtcgtgccaaggagatcgtcgtcggtcgtacagcaacaggcgattcgagcgagacgaccaggagagatggcggctcggcttggagagctcgccttcgacatcgacccgctcctcttgcctccgctcacagtatcgcgctactctcacctattgcgaggcctgcactagcggtcctgtctctcctatcccggccaagctcattctgagaatgctgctctcaccaacttgcggcagtcgcgtcgcttggcgagcttcgcctgtcgccaaactccgcgctcggctgctgccaggatcgtcgagggcggcttcatcccagctcgggctcgccaggagagagggtccgtctgagcggcacttgctgtccgacctgctggctgactgttgtcctctgcctctctccagtctacgaggagccggaagacgacgaggtgcacgtcgacgggccggaagcaccttcgctgccgccgccaaagccacttgcgccgcacatcacgctttagtcggtctcgccccgccctgcacgctgtcgccgatatgagctgacataatctcttgatcagtgccgactcctcgtttccatccaagttgacgcacacgcttctctccgaggtctctctcccacgccggccggttcgatccgccgacctcgcgaccaagtcggcctggaagcaggcgtctgcccgacttggcatcttcctgacgcggtcggtcgacaatccatttccgctgccgatgaagtacgagcgcgtcgctgggcgcgggcccgaaggcgagaagctcagccgctggagggcgatccggcgcgaggaggacgaggcaaggtgcgcgctgctccttgcctttgcgcgtacggccggttgctgattgctggtctcgtccctacagatcgcttcgaggtgctccctctgcccttcttctgcatccggacgagtcgccgcaaacgagcccgtctcctgtatccgggccgacgcccacaaccaccgccgtcgccccctcgcagtcctctcgcgcacagtttgcagggccagcccagcctcagctcccactctgcgtcaattggacgacacgagagtcatttcaggggccctatatgttctctggcgtcgagaagatggtcaagtcgatgcgagcggcgcaggagacacgattcgcggccgagcgcacgtccattcggcgcagaaaatactcgcagccgggacttcagactgacgcgccccattttcaaccattttcaggcacgtacgacgcgtacctgaagcagaagggccagcgcccgcccttgcgtgagaagccgcagacagacagcgtgcgctggtgggaatgggcgttcgcgctgacctttgccagcgcgatcgagtggcagtttgacctgctcgggcttcggacaagagtcaatcgcgagcgaaggaagtggggcctggacgcatgagctcaaagccgcccagcaaagcaggagacagagcgaccgttgtgagacggtccatggcatgaaagcagtggtcatcgttgtcgtcattcgtcgtaataccgaggccaagcgtcaaaatatgacaatcccctcaatccagccttcgccaatcacctcgagtacacagcctgtgcccgcagcgacaagcctccctccgccttcccgtcctgcgctgccaccgagcaggacgcccgcgccccatgagccgtcgagcgtccggtcgagcggcatcgaccgtcgcaacgcctcctctggctcgaaggagtgccgggtcgattcgatgggcggagtctggcctattcccggcggctgagttgagggcggagagggcgaaggggagggcgacgtcttgctaggcttggcggccttgctcttacttgacgaggacgggtagatgacgtgtgcaaggacgcccgacttggctggggcagcgaggagagatggtgccgagagagttctgagaatggtttcgacctgtgttggcgagtgaaacggtcagcgttgcgcgatcttcacgtgctgcctcaccaagaagaaacccactggcgtgcggacgtcaacctcggtccctgtcggggttgcgagagcccacgggcagcgctcgtacctgccccactgaatggctcccggctggcgtgggtacaattgtcagcgttacgattggttgagacaaccgagtggcagactgacgaggttcgagtggaggacgagcttgtgggcgatgtgtccggccgccgtcggcagaatcaggacgtcgaggccgagatgaaagtaattccagaagtctgcgttcaagaagcgtgagccgtctgcgtaatcgctagagggcagttgttgaaataacgcacagagctgaccgacccctccaacgccttcgtcctctgactcaccgcccgcgccggccgccgtccgatgaatgccgagtctgtcgtcgaccttctcaaacgtctggctcggcgccccgagttcagtcagcaggtcggccgtcgttgtctcgccgacgcggacggtcacagtgacgatttgcgcctgaacgtcggtcgtcggctgctcaggcctcgcgccaggagtaaagctgaggcggactgaagatgtggacatctgtcgggatacgaaaagcggaagttcgggtgagctgtggcgcctgaggcagctccttggaagccatcaggagtgggagggttggactgacgttgatgagggccttcacgagcgcgcccggccgtacgctgcgacttggcatcgactcgtctgcgggagctggctgaacctcaggcccggctacgaccggccggcgcgaccgatcgcagatccaaatctggcggcagatatccggctcgcccgtgccggcgctggcgggcgaggggccaaagccgaagccaaggccagggtaccagacttcgaccccggcggcattatccgacggccggccagcaccaaaccgagtcgatggagtgtcgaaagtcggaccaaagatgcgcgagacgtctcgcttcgtcagaggcccggtcccctgcccgacgagaacgtcgctgcctgacgtgagagttactcctgccggcgggctaagcgacaggggcgccagggtcggcagactgatctcggctagcagctgtgacgggccggcgaagacgagctggaggctgagagacgcaggcaggagtgtcaagagcactggtccggttgcaggatcctgtgggcgagttgagcagagcagccgtcgcacagtcagcgctgcgcgcgcccttcggctccggccgctggtcgctgaggcgaaccttgtcattgaaggcgatggcgacctggccatacgctcgccgaccctcgacgcctcggagctccgacaacgtctcaaaaagcgagtctcctgcggcgggaggcaggatcgcgtgtgcgagctgagcgggtcagctgcgcgcgcacatcaggcacgaaggagagaacagccgcgaggtggtgtctgatgggacgatacgaaccgagcgtgaagggaccgagcgatgaagaagtgagaggaagctggagcagcgccatgacgcctggttgacgaggccgatcgaaagtctggacgccgagctcggagatgagagggaagaggtgatgcgatggtgatcgagctcgaggggagggctcgtcgggaggagctgtgcgcgtgcgagtggatcaagccagaggaaagccaggtagactggctagggcaggaggtctgtcggcttgggttcgcgaagagtggcgtgcagcaagatggtggtcgagggtaacggtcgcagcaggtcagccggccgaggctcgcgcagctggcaagtccaaactgggcccgtgcatcctcttctggggcgtatctggggtcctcctacccagccaccttgtcgcgcctctggccttccctccgagcaacccactttccgccccctcccccgtaccctctcacccatccctccttaggtctaatcatggcgcctcagacgccgccacgcatgaccaagaagatcctccagcagcagcctccccgcattgtccccaagcgggtagtagaccggtcgtcggtcctcggcttccagcgctacaagccgttcccgcgccttcccgccgagctcgtccagcacatcatcgtctgcggcgccgacaccgtcggtctttcggccgtcagtcgaccaggcgacgagcgtggaggcgcggccgaagctgcccactggctctcgacgtgctgcctggtctgcagcgactggctggtgcgtcccgttcgcgacgtgacccgccgcctcgcgcagcagcacgagccaacccgcctcccgtcggctgacagtggctcgcccctctctcacagtccatcgcccgaccactcctcttcgcgcacgtctcgctcggcacgatcccatcctgccacctcttccttcgctcactcgcctgcccgctcccacccgcgctcggcggccggccgctctgggcgctcgttcgcaccttcacctatgccgcctggtcacccgcgctcgaggacggctcggccgcgccggtcgaatacagcgaggtcgtcagtctccgcaaggccgtcctcaagtacctcttcctcggctcgacgacgtcgatcatcttcccgacggtcacctacccgcttctggacagcctcgtcacgaacaccgacgagatcgacaccagcgaccctcgtgcgccaaccctgcgcggactgggaaccgttcttgcggtcgagaacgcccagctgagtcgaattcttgccgctccggcttttggcgtgctcgagcacctctccatctggtgcgttagcctcgatcgctagaatgcctttcgcgaggtctgacccttctcttctgccctctcatttgccgactcaggtatggagaccctgccaccggctccctctgtcttcctccgacacttcgctcgctcgccgtccggtgcgaccactttcatcaaggatgcaacatcccgttcccggccctcccgccaggcagtgggccatcaacgcatctccccctactcaagacgttgcggttcgagtttacgacccggcgctacccagaggcctcgccatggggcccgattccgctcctgctgtctgccgtcgggtcgaccgtcacccgcctcgggcttgcctgcgaccgcggctcagcgccggccaaccagacactcgatccgctcgcgctcgcgatgtgcccgcagctcgaaatcctcgagctcacgaaccaccgactcgcaggtcccgatggcagctgggctgggatcgagcatcgtcgggtcacggagatccattaccggctcgacggcgcccggccattcgccctggcaccccccatcccggttaccagggccctgacaggcccccttcccgccggcttgcacccgcccatcgtcgactcgctcgctctagctgagattggcagcctcctccgctcgcccaaacacctgatggacgcctttccgacgctccggacgctctcgatcggtcgcctgccgtccgcggccagcgtcgctcgctcgggcccgcacgtctggtctcagctcgtgttgctcgccagccttccaaggctcgcagccgcggccggcgtcagccaggtcgtcgaagtgacagacgagtggcaccggccgctcggcgcgctcctcgccgctcgcgcaacgccctttatcggccgctcgctcgaggtcgagccgataccgacaactgtcaccactccaccggcgacgatcaaatacctgccggcgacggcccgcgcgtcgacgaccgccggtccgcgacgttcgctccggcttgcgagcaagagcggatgtgcccaagccagtaccagccctgaggctagtggtagggcatcaacaacctcgccaacaagtagcatcgagcccgccacgcccaacagcagcacgggcggcagcagtgcgaacggccaccgcctccggccagccggctccagccgcaagtcaaccgtccagagtgcgctcccttccagctgcgcacaaaccgctcgtctgcatcaactgactcgaagagtgcccttcgttgccagaccatgtcgagctcggcgcggtcctcgtcgccggttcgtccgacgacgacgacagcgcttgaatgaacgtcccgacgccctacaacctttccgacattcaccccgacgccatcaggacccgcaattctctttgacgcgtactctcgcaaacaagctggccgccccgggaccacgcgcaccatcacggtcccgttcccgactaccttcgctcttccctctcttgacggttggccttccgggacctgcagccggtctgcccgggcgctgccgtcgtcgcccccaccttatccctctttctctccggtcgcccgctctctccgatccccgtcaaccccgcgcagatcgggccgtgacgcttccctccgacgccttgcgcgctcgctcgctggcaagagagatacgcgccgcgccacctcgtcctctcgtttctcttccgttcgcttcgcggccgcacgcaggccgtgccggtctgcccgtcttgttcccgtcgccctgtgcttgctcgctgaaggctttgatagctttgcaccatgccgctttgttggcgtctgcgccgtcctgccttagcagcttgcggtccgtctgctgttgttatttgtggtcgctggcgtcgtctctttcccctcgaccggccttcgtcagcctgttcccgcatgctggccgacggcctcagcttgcagctgcgttcggctcctatactgtagttcatctcgatcgaaggtgaggacaaccccgcgtttctctccacatggtggctcgcgacggacgacggcgggcgcgcgcatccgagcccgccgccgccgccgaacgcttcagcccaacagaccaacaagcccttcctctccttggcccccttcaagcccagcctgctcaacatcccttgcccgtcgtcttcgctcgcctctacgctctctcgctcctctccagcctcggcgtgccggatggacgccgtctttgacgagccggcgcgccgcaccgacgacggccagcagcagcagctttcgaccggcatcggcggcgaaagcagcgacgtcgcgttcgccgaccctcatcaccctggcccgacctcgggcgcctggccagcagacgacggccgccgaacgcacgacgtcgtcgacgccgagatcgatcggagctacctgcctcacatgacggccggtggcttcgcctcgttcgcagcgccagtcttcggcgacgacgaggcatacgcgccgaccttcggatacgagtatcagcccgaccggtcacctcgcatgttgtacgcacaaatttcggccagctcgacctggccagcgcccgagcctttcgagacgggctgggcaggcttccattcctcggcagacgtcggtcagggcgccggctctaccggatcgctctcggacgacaacgagagcgacgacgacgacgacgacgacgacgacgatgccagcccggttcaagcccacgctccctcggacctcttcatcacgaccgccgctacctgcatccctcctctcggtcggccctacctgccgaacgcagctatcgccccgcctagctgcaacgacgagcctctgctcgctaactctggtgcgcgccgggagacggccccggttgcaccgccagccgccgtttaccagccagcctccctcaaagcgcccactcgttcgccgcaggccgaacggcagctgttgaacggccagaagccgacgctcaagctctcgcgcgccgacaaggttgccatcatctacgagtgcgtcggtcgaccaacgtcgcgcagcggccttgctgcgagaatggagctaacgccctctcggcccgtctcacccgcccctcgcatattcttgctcccatctcaggcacgacgccaagccgagcctcactcaacaggagacggcgacaaaatggtcgtacgtcctgattattctctgcctgcctcgcctcgtcgccgggcgcacggttctcagacccaaacccggccgatggcgctcttttgatcccgccaacaccgatcttcgagagctgacccgcccgcaaacgcctctcttctcgattcccaaacgttccgttggtcttttgacccgcctcgcgctggatcgtcgaccccgttccgacggtgccgttgcgcgcgactatccgctcagcgtcgaccggtcgaccatctcgaagatcctgcacgcccgagagcgctggcttgcgcctgcatcgcctcctcgcccgccggctataaggccgccgccgcgcaaagtgacgctccggcccgaaggagggcgctacaagccggtcgaggagcgcatcaacgattggctcgaccagcgctaccaggcgggccttctcgtcgacgacgtggccgtccgtaatgaggcgcgcgaggtctggcgtacgctccagcgcgaggactttgaggctaccggcgagaagatcgacgagagcaaggccttcaaggcgagcgccaagtggctcggctcagtcagtctctttgtcgaagatcaagtcgggcttggctttagctcatcctctcttctttactacttacagtttaaggatcggcgccgcctagctggtcgtctcatggctccacttccgccgccggatcgtcccccgctgccatcgccaggatcagcttccacgtcgcgctcgcactcggtcacgtactcgccaggcggtctgctcggctcgccacacggccgactaccagcgccagtatcgcaagccgttgcccaaccaccgcagcagctcctcctgcagcagccgatgcagccacggcgcgcgctcgcccatcgtttgtcgtctctcaacatccctccggccggctcggcgcacgccttgccgttctcgcccccggattctgcctcgagcgcaggcttcggcgccgctcaagctttcgccagcagcgcccatcgcgccctcggcgcagactcgccgcgcggcctttccttctcgggacccaccggcgtcctggctggagagatgacctctgacgccggaaacggcggcggcggctcgagcggcctcctgagtccattctcggccgactggagctcttcggcacccggccggtttgccttgcagcagcagcagcctcctcgccggccgggctctatctctcgccacacgaaccccgtctacccgccgggcgacccgacgccgacgagcggaggcgggctcgggaaccggccaggtctcgcgcagcggccacactcgacgagctccgtctacccgcactaccaaccgtcgcctgctcagtccgagagctcgcagacacgccgccggctcggctcaggcttcgaggcagtgacgcagcggagcgagggcagcatcagtcgacgagatagctcgcttgcttcccctgcgacggccgaagccaggtcgcgcgcctcgtcccggaccggctcctgggcgccctcaagcccttctgcctcgctcttcgaccggctcgaggaggagcgccgtcggaactcgagcgtcacgagctacagctcgagcttgattccgtcggctcacttgcagcacccatcgcagctgatgccgggcaagcccgactcgatcgatggtccgtgggtcgtcaatgcaccgacgccaccggcggccatcagcgcccgcgactactttcctcattacgctcagccctcggaaggatcggcccaggacgcccagtactcgcagccgccttcgccccggcagcagtcgtactcgttgccgcagcgccaaaatcacgccagctccaacgaatcgtcgcatgcgggccggtgggcgagccagccgtcgccgctcgagtcagcctacaagtcaacgtcgcccggttcagtctttggtgacgcctggtcgcgccagcttcctcagccgacgaccaggcatccgcatgcatccggctacgggccagccgagagtgactggcacgcccgtcagcccgaccagcagcagcagcagcagcagcagcagcagcagcagcagcagcagcagcagcagcagcatcgcggtaatcacccgatgtcggtcgacccgttcgagttctcgcgcgacctgcagcagcttcgactcagcaccacgcctggccctcctccggtcggcacttcgtactcggcagtccactctggctggggcggtcgagcgcctcagtgggaggaggtcgggcactatgcgaccaagccatcggcgcaacagcaccaccaccaccaccaccatcagcagcagcaacgaccatcctacggctcgcacgagcaaggccactacgcatcgcctcagcagcctgacacggccagctcctaccctccgccgccagagcacggatcgtactttgccgaccgccaggcagagggcgaccgaggcggccggcctcacgccgatcacgcgctgtattacaccgcttcgcacccggcctcgtaccctccgcagtcgacggcctgcgccccacacccgtcgaccaaagagccatcgtcgtacgacgctcggctgcacggcgcctacgacgagccgccgcagcctcacccgtcggtctacgcagcgccgccgccgggccagtaccggcacgagaccggccacggccacggcagccaactcgatgcctaccaccgcggctgaggcgtcctcactctcctatccccatcctgttccttcttgtcctctcgcttgcgacccatccccgctctctgctcgatacccccccccccccttcgtccctgccctacccccccccgtaaagccttctcccccccccgcccaccatgtcccagacgtctgcgcccttctcctctcccagttttgctcgtctcgagctgttacttacacgctcgctccccgccgcaggtttattcccatcaccggcaaattcgacccagaccagcccaagtcatgggcgtcggagcttgccctcctcgattggggtgcgtccggcctgatccagctcagcctggcccatctgtcctgccttggtcacggcaggttcgagctgctccgtgctgactaaacctcctgacgactgactccgttcgtagacaagagctccgtcgtcttcaccaagcggagcttcatcggtgcgtcccccctttgatggcccgctctagtcgccccgccctgctccggccgcagcccgaacgcgactgatatagctgacttctttcgtacgcttctcagagttcctcaagtgagacctgcgggtccgtctgaggtagctgaaggcgctgacgtttgctgatcttaccgcgcctaggtcgatcaacgtcgaggtacgctgcgtttcggccctgttgtcgctgcaacccaagggctgacactcaattactcctcggacaactaggtcggccctaacttcaccgagattaacaaggttcccagtgcgtatcgcgaaccgaaaaggggcggggggcaaaggcgtcgtctagccgccgaaccgcccagttggctgactgctctccccggttggctgcgcatcgcagagtacgcgacgttcggcaagctctcggagcccgaggaggccgctcctgctacgaccgagcaggcagacgctccttcttccgctaccgccgctgctccggcgactggtacgtcctcttgcggcaccttaccacgctagaagcgctgattgtcttctgttcgtttgttctcgtccgcagcggccccgacttctggcgctgcgcccatcgacgagcccgaggcgccctggggtgccaacgcgatgcgcccctcgcgcaaggtccgcgagccgccgggcggcaaggtttcgatccgcttcggcgactacggtgcgtctgcgagcgggtgggcggctctgaaatgctttgcgagggtcaacggctggctgacggctttcgcttgggttcacagaggagccgagcgtcgtcgttcctccgccccggaacgcagtcagtagaagtgctctgatggaacgcctgtcgccgaggctgaccccgtctctcagcccgcggcccagacgcccgaggtcgacgagtgggcgcccaaagagccctccgccgccgctccggccgccagccgccccgcccgtcaaaacccgttcgagcggtccgaggcaccctcgtacgagcctccgcggccgtcgcggcgtgtgcgcgagaacccgggcgggaagtcttcgatggtgcgtgctctgctggaatgcgaaggagcgaacgactgctgacgctcgtgcgcttgtaacaggcggctcttctctctggtggtctttgagtgggtgggcgctgcgtaggacggggctgtagacgctcgctatggcatcttgagctcgatggtgagctggatgggaacggcatgaagtgcaaggcttgcagctgggcgaccagaacggcagtgatggctgctgtcgtcgtaaggccttatgaaagcggcggcgcccgtcgacggcggtttgtgttccttcgctcggtcggcttgcgtcatatatcaaagtgcatctgatggccaatctcaagggcgatgggcttcctcaccttctgagcaaggaggaccgaatgcgcatagctgagcgacggcgcaaccgataagcggagctgagcggcgggtagacaattcagtcgagacgctcctcttctgctggtcgggcctaaagctgacaccgacccatgcttgccgcgttgactgatgatcaagcacagcgtctggtaggggccgggcgcgtcgcgtcgcacgcaacgccggcgtgttggccgagatctgaaagtggaggcgagaggtggaggcgacctgcgcagcagcgcgacgacccctgaccgatgaccgatggccgaacgcctcggtccgacaggctatataggccagctcgccagctcgcccttttcttctcttctcttctcttctctcttctcatacccctcttctcataaccccctcacctcttctcatcactctagcatcccaaccgaccatgtccatccctgctaacttcgacaaggtgcgtcggtcggaagcgcctccccaccatctctccgctaacgtaccctctcacctcagaacacgacgagcgaggaggtcgctgagcacttcaagaccgccatccagggcaagaacatcctcatcacaggcgcatctcccaaaggtctcggcgccgcctttgcccaggccgttagccggcactcgcccggtctcctcgtcctcgccggccggacgcagaaggcacttgacgagacaaaggctgagctgctcaaggagacgcccaaattgaacgtccggctcctcatcgttgactttgcctcactcgaatcggtccgcaaggccgcggccgaggtgctcgcctacgaagagaatattgacgtctttgtcgccaatgccggcgtcatgggcaccgccgagggcaagacggatgacggtacgccctgcctgattccgctcgaaggacggcgacagctgctgacccgatcaaatgttaacgcttgcaggcatcgagacgcagtttggcgtcaaccacgtcggaccgtttctctttacgaacctcttgctcgagggctcgtccaagcctccgcccaagcgcatcgtcgtcgtttcgtcgggcgcccagcagctctttccgggaggcgtcaactttgagcagccgggatatgtcctggacaagaaggacgtctacgacaagtgggtcgcctacggccagtccaaggcgtccaacgtcctgctcgctgcagcgcttcaccggcggggtcatgaggccgtctcgctgcacccaggagttatccaaacctcgctcaccaggcacatgagcgaggacgactaccggagcgccggtgcgttggaatgtcgttgaccaccaacggccatgactgacaagttgtggatcaccaggctgggtcaacgaggacgggtcgttcaacactgccgtcgagctcaagtcggtctctcagggcgcggcaacgtacgtccctctctcgcctcgattcttttacttccaagctggactgactctcatcgactcttggtgttgcaggcacatagtcgccgcctttgcgccctcggcagctctcttcccgaccggagctccggccccttacctggacgactgccagatcgcgctcgaccacgtcgactcaacggcaaagggcgtcgagcaggaagagaagctctggaaactctcggagcagctcgtcggccgcacttttgcttagctaagttattgatgctcttgttataagatctttagctggcaggcgcttcctgcaggcagtgtcagtcccagcgcacctcagcctgcaactgagcgagagccagatccaggagcggtagcgaagggtcaggggacactaaaaccgagaggagggtgctggacggcagaagcatgcggcatcagctcggcattcaaatccccagtcgtgcagtcaataccaggtaaatggggcacatgagatccgtagggagagcgctcaaacggctcctcgcgagttgccgccgacaaactctgcttcctcgcgagacggcgccccgcgccgcgcaccctgccagcccgcccagtcgacgtcgctctcgcggtcgcctggcctcggcccatgccgtttgttgctgaccgccttggaatacttggccgccttgcgctgctttgccattgccgcgccgccggtagggtcgaagctgccgcccttgacgccgtagccgaacgagccgtcgtcgatcaggtgcggccggcgcgactcgcgaggcgggagacggtcgtagtagcctggcggcatcacgggctcgggtttgggcggccggtcatacgagccgtatggccgctggcgcatctgctcgatctggatcgggatctggcgagtgtgacggagcggagggaggtagggaagagacgacgttgaacgtcagcagcctgcacacagcgagagagcaagcgtcgtcgccacgcaggaccgacgcacgtcgttgatcttcatcccgtcgagcctgagcgcatcccgcatgtccttctcacgctcgagcgagacccagccgtagccgcgcgagatgaagcggccgtcgctccgggggtaggcgagcacgcgggcattcttgacgaggataccggctgcctcgaaagcggctttaagagcggcgttgtcgacgccgtgcgggacgtgccggcactgcgagtcggcagggagaaggtcagcaccagaacgtaatgagcgtcaacggatgcaaggaacgcacaaagacatgcgtcttgttgtacttctggatctcattccgcgacaacatgctttcaaactcgaccgcttgctgctcgttcatctctgccgggacttgcacagtgagctctgcatcggtcgccagcgcctcttgctcgagtgctgcgggggcgaccaggtcgtcgtcctcgagcgccgactcgaagtcaaccgtcgtcgtcgtcgtcggtgttggcctcggctcaggctcgaactcggacgagagcttcgcccgaggcgtttgggcgcgggggtagccatgcgctggactgctcgagaaggaccgacagctgctgctgctgctgctggcgtggtcgagttggctgcggctcgggccagcggcgagcaggcgggtggcggtcggaagggttgccattggacgcgaggtcgaggcggccgcagccgagatgacggcgtttgaggaccggcggaacagcgacatgctgagctgtaaggtggggcaggaggagagtagtcgttgtcaagtagctggctggcggcgtccaggggttgcgtcggaggcctgaacggcgtcaggctcgaaagggagttcccaggctcgagactaaccctttggtttatttcccgcccgctctgcaaaaactagcccggcagagcactcgcgcgagtgggcgggtaggcttgccctccctgcgcagtgctcttttcaccttgctctcgtcctccagcacccagctaccagcaaacccccccccctcttcctcttttactctttatccgtcggtccagcaggaacgacagatccccaagcaacaaacactactcaacatggcgtcagtccatcctctgctcggcggcgactcggcggcagcgcgagaggcttcagccctggaggtggacgagcccgccagacaaggagggccatgtgctcgccctcctggtctcgctctcgctgctttctgggaatcctgagccaggcgaggcagcctgctgtccttctgagcacgagttgtcgcagtggccagcgacgaccgctcaggtcacgccctgctcgggtcgacgttcgctcaacctcgccccgagcgtgctcccttcgccggcgtcaccgggccgtgccgaccgaccttgtctgttgttgagcgctctcactgaccttgcctcctacccctggctcatgcagcgaagttaaccttgagctcgagggcgagaccatcgagagcaactgggaccagattgtcgacaagtgagtgggcgctttctcggtcacacttttgtccgtctgggcctcgcaacactaaaagtgctgaccacctgcctctcttctttgcgctagcttcgacaacatggagctcaagcccgagctcctccgtggtgtctacgcctacggtttcgagcgcccgtctgccatccagcagcgcgccatcatccccgtcgttaagggcaacgacgttatcgcccaggcccagtcgggaaccggcaagaccgccaccttctcgatctcgatcctgcagcgcgtgcgttcctcgctgcggctgctatcaaccgtgaaggctgaggctgacccttttgccccttctccagatcgacacctcgatcaagtcaccccaggccatcattctcgcccccacgcgtgagctcgcccagcagatccagaaggtcgtcatcgccctcggcgactacatgtcgatcgactgccacgcctgcatcggcggtgtcaacgtccgcgaggacatgcagaagctcgctgagggcccgcatgtcatcgtcggtacgcccggccgcgtcttcgacatgatcaaccggcgcgcgctcaagacggaccacatcaagatgttctgcctcgacgaggctgacgagatgcttggccgcggcttccgcgaggttcgttcccttgcatttgcctgacctgacctttcagagcggtactaactcttgcctactcctgcagaacatctacgacaccttccagctcctcccccaggagacccaggtcatcctcctctcggccacgatgccccaggacgtccttgaggtcaccaagaagttcatgcgcgacccgattcgcattctcgtcaagaaggacgagctcacgctcgagggtatccgccagttctacattgctgttgagaaggaggactggaagctggacacgctctccgacctctacgagaccgtcaccatcacccaggccgtcatcttctgcaacacccgccgcaaggtcgactggcttaccgagaagctcacccagcgcgagttcactgtctcggccatgcgtacgtgctccctctgcttcaggttgcttaaagccgatgctgaccgtgtctctttcccttttcacagacggcgacatgcagcagggcgagcgtgaggtcatcatgaaggagttccgctcgggctcgtcgcgtgtcctcatcgcgaccgacctcctcgcccgcggaatcgacgtccagcaggtttcgctcgtcattaactacgacctcccgacctcgaaggagaactacatccaccgcatcggtcgcggtgggcgcttcggccgcaagggtgtcgcgatcaactttgtcactaccgaggacgtcccgatgctccgcgagctcgagaagtgtacgtccttcggcagccttcttttcgagcgacacctagactgacactttgtctttctccctgcacgcctgctagtctacaacacgtgtgcgtgcccttgctcccctgccctcgaactagttactgacgtagatcttctcctctttgacttatacagccgtcgacgagatgccgatggttcgtccgcccagcatagactttgcgagggagaaggctgacgatctctctgtctctgatccttcttttttagaacgtcgccgacctcatctagagaggctgccaccgtctctcccggcgtgcactcaaccccacacgcctctttgctcttcacccattaaaagcccctcgttgccctcggcgagcggtcacccccttcctccttttctctattgcattctcttgagcttcaccctggtgcagtcgtcatcctcagttgtctgtccccctcagtctcataggaattggagggaaggcgcctcctggcccaaacaagctaatccgaaatagttgtgcaagctgggaggatgggctacgctagggcgcaagggaaaagagtagtaagcgagtggcactggcgagggtctctgaggctgctgagcaatccctcgtcgaagccgcgctgctgagcgggaatcatgatcctttgttgcgggcggctctcccgaggattacgaggcgcctgggctcgggatcagatcactgacagtcggcgatgatttttacagccgtcggcgccctcctcccggctccctctccgccccctccgccttctccccctcagtgatcctgtgcctagcgggccggctcctcgacggtccagctttcgagccggccttcaagacgctcgcgttcgcgcgccgcaatcgtttcggcgtacccgtccgggatggaccggagagggggctcatcgcgccgcctcgtgtaagtgcgtcctcttgcggccaggcgcgaaagccgtccggaggatagccatcggcttggtggcgcttgatgtgcaaattgagcgagtcattgctccgaaggaccctgccgcaggtttgcggaatgcggaatactccttaagtcagtctcactggtaagaatgcacttgcagggaagggacgtacgtcgggcgcctcctcgcagacgaaccggaggtcggtttccttgaggaggtagcagcggagctcgcctgcgtcgttgaggtcgccgatccactgcgcaagcggggaaaggattttgcacagcgtctggtaccaatgtcgaaggcccaagaagggacgtacccgctcgttgtaaaagttccaggagatgcagtcgcgcttgtgcccattcatatggaacctcctgacaacccctctgcagtcctggcaaggcgaagagagcagcggctcgttgtggtcagcttcagtctcgatgctcgggcggcggcagagcaagcaaacaggacagaccatcagtccgcaccgcttgaaaggggccactgctgaaagcgacatccctcccttcttctttgtccaatagacctcaaacgagcccgcgatcgagtccaggccggctgcgacgatgtccttgcgcgtgattggccgccggaccgctctccccgtgcctcctgccgtctgctcgctgctgccggcgttgtcgctgcccgcggtcgcctcgtcgggctacggctccgggaggaagagcgccggctgcgtcgagcttgccgccgtcgcagagaccttggccttcttgcttttcggcttcgactcgggcgaggacgcagacttgcgcttgcccttggcggtcggaggtggaggggggacgcagagctcgtcgtctctagaggagtcgatgccggtcagagcgtcgtcgtcgctctcaaagctggggacgagcgccttggccttcccgccatccatgaccttgagcttgcctttgaggaccggcggaggaggcggagggacgtcctcgtcaacgctcgaggtgtcagggaggctcgcagcgaccgagttggccgtctcaatcgagcccgaaggcgtcggcttgggcgagctcttgcccttatcgagagccgcagggaggacgttctcgacgaggtcgtcgccactaggaccgtcgtcgccgcttgagacgtcggggaggctggcgacgggcggctcgacagtcccgctcgatcccgatggcggcggcttgtgcgagccgggggccgtttcggtgggcgagacagaagggagaaagccagcgtcgtcgttgatgtcgaggctggcggcgagcgggtcggctttcgagcccgatggcattgactcgctcgagcccgtgccctcgtcgtggactaggaggtggacatcgccgacgaggtcgtcgacggggtcgagagtagcggcttgcgacttgaccttttcgctcgagcccggcgtcgtctcgcatgacggcgtcttgcctgtggccttctcgctcgcgcccgacgacgtttcgcccagcggcgtcccactcgtctccctgcccttgcccttgttggagaccgggttgatggacggcgacgcggccgactgggcgagtgccgatgcgacagttgccggtaaggggttcggagccgcacggcgtttggcggacgaggcaggagcacgggccggaggcggctggctccgtgccgtctgagtcttgctaagctcccactgcttgttgaagcagaggacgtttcggctacgagggggcagagcgaccgcggcaaagacctgcttgaagagcgggatagccgtcgcaaacgagaagccaccgcagagcccgttaatcgcgtcctcgagcaggatgacgtggccgcgcgcggtcttgggcgggaagtcacagacaaccttcaaggtatgcgtgaaggaggggtcgtagccgattgagtagtgatcgctcaattcgccctgcttgcggtgctcgtcgtgatcctgtggagagggcgtcttcatcagcggcggggtgggcatcgaagggatgggaagggacgcacgagatggctccaggtgccgaaccagcgccgtccgaagccgttagcgctcttgaggtcgttatcctccagccaggcccaaacctgcataggagctagactcaaaatcacatactttggtcggcagcggctgggcgagacgcaccttggggaagcaacgccggacgacctcctggtcgtaacgtggctcggtcgggttcgtgccctccgacttgcccgtgtagcggccaacgagccgccggtcctgcttcgaccagaggctgtggtcgtacacgccatggccagtgtcgtcgggcatgaggtcgcggaagtcaagcgagttgtagaaagccaggtcgacgggcgcattgcgctgatgacggccgatgagacggacggctccattgccgaggacagaggcatagaggccagcaaggcctttcagctctgcgtccgtcctcgtctcgagctcggcgactgccttaaggctggccgcaaccgtctgggatctgcgttgcggctgcgagtcagcacgtaagcaggggcagcgcaacgactcaagacacgaacctggccaacgacttctggcagaggaggtagcgcaagagcgcggccagaccggcatcgtagtcgtcgtcctcgactgacggaagcggccgcggagcctgccatttgtcgaccgcaggacggttcgtgtagggatgctggcgggcgaggcgcgggcggccgagcgacgcgcacgggttcgtcagtcagtttcgcaagtgtcgacatgcggacgagaagagggccctacgatgacgaaacctgcctcgatgtctcagggtgagagcaagggtcaggacctggagggtcgagcagacgctgagacggctgcccttgaccgcgtcgcaacctcgctcgacatcatgcgcttcccatcgacatccttgaccttccggaagactgcgatgcgaggaagggcgtcagtaccgccggtgcgcgagtcgaacagcgtaagcacgaggcaccgacgcgccgcgcaggatccgctctaccgccgaccaaaccgaggtgaaacgtcgtcatctgcgcgcgagaaaagggggcgaagcgagcgcgactcgccttcgtcggacagggcatcgaagtcgaggccgctgcggacgtcttgcaactcgagcaggtcatgagcagccttcctgcgaggtgccaggtgggtcaggaccgacgggtcagacgaagacgcagtgacgacaagaagcagcgacaagagacgcactggaagcccgtcttcttctcagccgtctccccggtctcctcggcctcctcgacctgctcggcctcatcggcctgcttggcttgctcggcttgctcggcttgctcggcctgctcgactgcctcagtcccgcccgctgcggccgtcgcctcgaggcaaagatgggagcgcttggaggtcggatgcaccgcgagccgagcctgttgggctcgtgcctgatgatctcgacgaacgactcggcctctgcaccggaggaagcggaacctgacgacgcggtcgcaggcggtgtgggtgggagggtgcaggcagggcggtcgttgtcggtagcggcggcttgggcggcgcgaaggccgacggtggcgccggaagcgacagaggtggcgtaggtggcccgaacggaggcaacagaggcggcagcgttgttggcgggggcgggaccgcgttgcggggcggcgagacggcggtcagcccgcgggtaggcagccgaaaggtcacgagctggcgcaggtaggtcggcggcagcaaggcgagcgacggcgtctcgagcacgaccgacgtaggcggtggcaacagagtggcaagcgccggcggaccgtcggcggcgcgagcagtactggaggacgcgtcgtgggcagcgtcgtcgccgaccaagagaacgtcgtcacgaatggcgtgggcggcgcggacggaggtagaggtggtggcgtcgtcgttggtggcggtggcagcgcaggcggcgcgaatgacggccgaggaggtgccgtcgtggccggcgcgctgtacgtcgacggccgaggaggtgccgttgcgaccggcgcgctgggtgcgtacgacgtcgtcgacgatggcggccgagggaacgtcgcagccgactgcggagactccgcgccaccgcgctcggcgcctcgtgcgttgtgagtcgcataatcgccgtagaagacgaacagcggtttcgatctcgcgttgaacttgtagcccgagatggaacaggcagcagcctcagcggcctctggcgacgagaagcgagcgacggcgccagcccattcgccgtcccggggccaggtgtcgccgtgcttgaaccagtcgacaccgactacgaatctctgagcgcagaagccgaatgagaccggcgccgtcgccaaaggaccccatcgctaggttgacgatcgtgatgaccttctgctgctgggcgaagggctcggagttcgggaacgactaaagcgccctcttagcctcagacactgctcggggtgggaacgagaggggggaagggtgagatggcgagctgcgtgcaacggggaggagagacggaccggtgtcgaaggatatcgtgcagcggcgaacctcgatcctgccgtccacgttcgcctgggacgagacttcgaactcaatgatcggccggccgagctagaggatctggcacctgcgctccgcagcatccaccgtcaccaggctgggagggaggcgcataaggacaactgcagggtgggcgagcgagaaggatgaaaagggttcagcgagcagacaagagggctgagcgggcctggatagggaagggaaggtcgtactggaggtttctggtgagcgccgtgccgctgcatgcggtgccattgccggtccgacgttgcgccaagagtttccggtctgcgacatggcggatgaggcggtaggagctgctggaggagctgacggtgctgggagctggcggtcggccggagagacgggggtcgccgaagggaaggcagtggccctgcacggccgcgtgacgatgcagagggacagtcagtgggctggaggggctgggcgagctgatactgttccagcggtggcatcgacttacctggtgcccgcaggaggagcaggagagagttgtggtcgagggaggaaggctcggagcgagcgggcgaactcgccggccgtcggtcgactgcgcgccggacgatcaaagggcgcccgcgagcagggctcgagtactgggcgaaggccacttgctcaaggcgcatcctccctcgccgggggcgcttgttcgcaacaggtaggatgaggcgttctgcggtcggccacgtgcatggtcagcggtcggtcgggcagggtttatttctacctcatctttcgtgccggtggtcccgtgcgggtgtttgatgagcagcagcgaaattgcaagagtccagcaggacaagacgatagggagaggcaacggcgttggttcgggccagtccgggtcaaacgatgcggctggccgtagctgtcatccgaggagggtgggcgcgcgccgtcgcaggaagagaacacgtcgatcagccgaaaggcggcagtcgagaccgtgcagtcgataagccgaggcgagaggatccaatctcaatcccgggtgtgtagctcgaccgggagaggctggactcggcggtgttggttgaagatgtggaggaggccggatgggagggcccgcatcgacggccgccgccgctgctgtcgctgatgaggagcttggcaccgagctcaagccaggggctgatccggacggcgtctgtagacaaggccaaggacgctgctgctgctgctgccggcgccgagagtgaagcctccggacggccagcgtcggcgttgacggctgccgctgatgtcaccgtcgcgggtgctggaggtcaagcacgcccatgctttgcttgggctggacagatatcgtcaggccttcagctgaatgagcgtgaaagggcggggcgtacagctcgggtcccttcgcttgcagctctcgtcccgtctcgtcccgaccgcccttgtgccagctgcttcccgccggccgaatccagaagccttagccggaggccggaggagtcatccgctctcgtcgcacgcaagccgctctgaaggggtcctgcaggcatcagcgaagagtcagcactggttgtggttgatgagcagcgacgaacgtctggtctctgtcggatctctgctctcggcctgaagaggcgggccgcgtcacagtcgactttacgaccccgtgagatcgttgccggacgtactgcaccctcccagctctgcagtctcgagagaaagagagagagagagagagaggaggagaatctctgcagacatctcagtccctcctcgacagcatgtgacggcgacgggcagctagagggagagcagcagcacctgcgcctacgcgctgcgcctgcgccttgcgcccgcccgcgcgagccctctcgctccgacatcagccacagcgtcgacacccatctcgacgcctctacccaaccacccctccaaccttcaacccccttcgcttacatgtcgctcgatcccatctcatcgccctacctggccgagcaggcgtccaagatccgggccaagccggtcccgtgggacgtgggtcacgccgactcctgctcccgcctcgcgctcccccccctctctgacgctcctcttcgctcgctcgctcgaccctcttccctcccgctcgcagggctaccagcgggcctcgctcatcacgacgtccgagctcgcccagctcaagaaggtcgaccggctcccggccgataagcaacgcgacgtctgggccaaggagtccgagacgtacgctgcgctctggatgggcctgctcgccaagctcgtccgggtcgacacggtcgggagcgcactcgtcgggctcggagacatggttgggggtgcgttcgctgcttctggactagctgcttcgaggtgcagatgtggctggaggggtagcgctgcctggctgtttcgagcgagatgggacaagggcggcgagctgacgaggagggtgccggggcagctagccggcgagggtgctggagcagctcggccagcagctagagccaggcagagctcagaatttggctgggccatgcatggcggaagactgcattgcttgatggggcgcctgctgacccccgccgccccctgccctgctccgatgacggccagaggacaagccgacgctcgagctcttcttcaagctgccggcgtcggagaagaacgtgccgttcggcccgctgcttaagtacgttccgagctagagctccaggctctctcaaggctgacagtatgtccttcgtcccagggtcctgagtattcaggacgagtttatccagcttaagtcgctctcccttctcgccctcttcatccagggaaaagagggagggcgagccggctggccagaaggggcggggggcgaaacgcgaggggcggccgcgcagcagcacatctagtcacatgccgaggccgtcgcgccgtcgacgtcagcgacaggggttagtcatgctccggccgccaggcatccagcatttgcgaaagaaagcacagtcacaggggtcatcgagcgagacgcgacagctggtgaagggaaggcggcgacgagccgcccgtcgaagaacggaggggtcaaagcgcaggcccgaacgactgtcttatcaaagcatccatcacagccgtacgaggcgaccttgcgttctggcgctcgatgctcaaacctcgatagatgcagccagtgtcgcgaagtccatgtacgcgaacgggctgaaggcgtcgctggcgtcgtcgtgagcgacaaatttggctgcctcccgtgtggctcagcagagtgccgatttgtatcgagcacgccgagcccaacctttggtcgaacttctcagatgacttggaaggccgcgatgagggcaacgccgacgccgccgatgactgcgacggccgttccaaagttggcgagctggcgcttgaagcctgcagttgttttggcgtaaaagcaagacatcagtcagcaagatgcttaaaaaggaaattaaacttcctggtcgaaggatcgactgacgtgcgtcttccatcgactgacgtgcgtcttccatggactgacgagcgtcttcatccccgggcccgtcggcgacctcgatccggattttgcgggggagctcgacggcgagtgccttccagccgtcgtccatgatacgggcaggaaaatagctcgcggacattgggcgagagttggttgagaagctgatccgggccgagtcaatggagcgcaaggacgggaaggcggcaagggccatgcgaagggcgtcctacagagcagaggcacgttgccgtcagctatgtagctcttgagcctcttagtgagggtcactcacttcttcgctcgatgcaagcatgccgatcgcgtcctcctcctttgctgggaacggatagcgcggccgaaactggtagacgacggcgccgccctccttgcccggccgccggcgctcctctgcctcgagccgggccgcctcgtctacggcttctggaggctggatctcgaacgtcggccggccgtcgaagccggctcggtcttcgcggacgagatgggtccggccgagctgatcggtcaggacgtgaaggcggatgcctgaggacttctcctgctgttgcctgggctgggcatcggctggaggcggtcctgcggacgaggtcgacgatacgcctcctccatgcgagcttcgagagtcagcgagggccgcacgcgtcagcctcaggcgacgaccagctgccaagcaagatacaagcagacttacccatgcgacaattgtttctcgggcacaggcggcatggtcattgacggacgcggcgatggggatcagccccgtgggctggcaaaagggtcgtcttcctcggagccggcggcgacctccgaatcgcccttaccgagcgccgtcagctcctgttgccggtcgcagcggcacagagcacggatcgcaatggacgacgacgaccgacagaggagcagcgacgagtatgctggccagctcgcgctgccttggcggccttgttgccgtcgcttcgccgttttgtgccgtcgacttccgccgtatctccggaggctgcccccgcagagcgcggaagcagtctcgagactgtcctgggaggaggagcgaggccagtctttctcccttctcaacggccaccctccttctctcccttctgcccagtcatgaacgccacaacgattcagctccggaacctcggctcgcgctcaacgtcgactggcggcagcgtcgacgccgagggcgggccttcggtcctccgtgtcgcctcgcgcgagggcgagggcgagcgcgacccgctcctgctccagccgaagatccagtcggagcaggcgctcgagacggtccgccagcgggcgggtaagggcatggctggccgcaacggccgaaaccgcaagctcgctgccttctacgagggccagaacgaggtcggtcggtcgtctggcccacgctctcgccgccagccgccttcggctagcactggtcgctggcgggcctcactgactcaactaatcctcggcagcacatcaacaacctgctcaagccgatggccgtccacacggccgaagcccaggccgaggaggacgcctcggcgctcaaggtcaagattgcgatccgggcctcgttcatttgcaactgcctgctggccgtcctccagctgtacgcggccttctcgtcgctctcgctctcgctctttgcgaccgcgatcgactcagtctttgacccgttcgccaacatcgtcctcaaccggttgcacaagaagggcctgacggccgaccccaagaagtgcgtgacataggcggcggctggcctgtccaaacgacgcgctgctgcgccgattccttgcctgactcgagcgctctcccccaacttttctttgcaggtggcctcagggcggtgccaagttccagacgatcggtgcgtcggagcggtcggtgacaagacgaagaagccaccgctgacgtacctccctcattttcgcaggcaacgtcgtctacggcttcctcgtgcgtcgagcgactgagtgctgctgcggcatctgtctagcgtcggctgaccatcatcgccctgtcctgtcgatctcgctagatgatctcggtcaaccttgtgcgcgcctttcgacgctcctggccctattatgtcctctggctgacccggagcgactctacagatcctcatcgtcgagtcgatccgctcgctggcgactcaccggcccgaggacgacgacgacaagctgcacgtccctgcgctcatcgcggtcggcatcgcgctctgtcagtctgccaagcccatgtcgttgtcgtttcatcgctgaccgtccgacaattctctcgcagccaccaagtttgccctcttctgctactgctatgcagtcaagtcgtcctcgacgcaggtccagtgcgtgctccgagctttctcgtctcatctgctggctttgctgactctgtgccttacttctagggtcctctgggaggaccaccggtgagtcgcgtcattttccaggcgtgaaatcgcccctactgatgaccttgcgtcgcgaccgcaggaacgacctgcccgtcaacgcgatgggtattctcacgagtgccgccggcgccaagctcgcctggtggattgatcccgctggagctgtgcgtccttcgacctgtcctcgcttcgtcgccccagctgactcgacttgacttgtaccacgcgcactgttgcagatcctcattgcctgcggcgtcaactgggcctggatccggaccgtctctgagcagtttacactcctcgctggccgctcggcagagaccaacctgatcggtttcgtcacctacaagtgcatgacgttctcgcctcaaatacaggcgatcgactcggtcaaaatctacgccaacggcgaggactttatcgccgaggtcgacatcatcatggaccccgagacgtcgctccgtgtctcgcacgacatcagccaagatcttcaggacacgctcgaacggctgccgggcatcgaccgcgccttgtcagctccttgtgtgccgcgatgacagaggggcagcggctaacccttcctcgcactggttgcccgcatcaaaacagcgtgcacgtcgactgggagtacacgcacaagcccgagcacgccaagagccgctgagcggctgcaacaggcagtccgagtctccgtctggggtctgtcctgccgctgcttcaagcgcggaccctccacaaaggagaggagcaggagcgcctgacggcgtgattgcccaatgtccccttggaccgttcgccgtctgcccgcaacccgctctcctcctcagtcacgccgcccgaccactcgagtgcagagagagcgagcatcgatcggactggccgacaggctcagagcccggtcccgtcgctcccgacgctgagcacgctcccctcgcgcgacgacggcccggcgctttgagcagaggcagcagcagcagcggcgttggcctcggcttcacgcgtgagcgcgtagagccggtgcttctcgtgcggcatgccgatgcccatcccgcccgggcctttgtaggccgcgtagagctgcggatggggctgcgacgacgaggccgctgtggtggacgagccgggcggaggggcgaggtagccagacgacgggccttcagggattggcgtgccagagtttgaggccggtgcgaaattgggctgcgggttcgcaagctggtacgcggccgctgcggcttgggcggcagcgagcttctggtcttggatgagtgtcgagagggcactctcctggtctgcaagaccgatagagcacgtcagtcgatgaagacgtccatgagcatgggctgatagggacgtacctccgacccagccattcttcgacacccactgcaggccggtgattgacctgaccgaccggttgccaatcttccaccgtcgaactgtcgccctctttgcctcgcccttgttcatcagcggctcggctacatgcaccagcagcagatgtcagcatccgacgacgcccgagcagccgcccgaagaaggggacgcaccggtgatccatgcctggttgaacttgacggccggcgcggccgcgacgaaccggctccggttcttctcggtcagcagcttgcgcttctttgtcgaaagggccaaggggctttgccagtcgggctcgagcgggtgtgactcgcgcggctcctccatctccggaacgtacgacggctcgacagacgccgctgcgtagctccctcctgcggcacccgttccgacgcctgctccgaccaacgtcgtcgacggcggcggcggcctgtcggcgtccttgagccctttgcgccacgacttgcccgggccctggacgcccgccttggcccgccacttgcgcttcttctcggttagctgccggccggcgagaccggcaatgaccgactcggggacgtcgatcacttgcgctggcggccgaggctgctgctgctgctgttgctgcggcgccgaagactgctgatgctgctgctggtactgctgctgctgctgctgctggtcgagcccgtcatcggccgaggcgagcgacgacggaatcgagtcccgccggatccgctgctgctgctgctgctcatgcacgcctgaccgaaggggatcgtacgagccgctgacgtaggagcctggtggatagccagccgagctgagatggtaggcactcgtcgaagtcgatgcgacgggctgctgctgctggtggagggcgtaggatccttgctgctgctgaagctggtgctggtgcggatcgtatccgtgaaggttggcatgctgcggcgcctgctgctgctgctggtacggcgaatagtagctcatgcctggttgtggctgctgagcgtgaccatacgagacggcatgtggcggctggcgaggcggcggcgcgtcatactgcggcgaggggaagttgaggaggtcgtgcagcgtcccggatgagccggccgctcggaggctggagggcggcagcgtgggcggagggccgggctgggtatcgtcgttcggcgcagaggtggacatggcggcgggctgccgagtgagggtgctgtggtggcaagacgcaatccgagccgggtcagcccgagcgagagatgagggcaggacggtcgggaggcgtcgacgacgcgacagccgctgcgactgcagtgcccgagttgcccgctgccgacagaaaccctggtcgacctgtcaaaagcgacgcacactgacaggcacgacgtgaaagctctcttaggccttgcgagatcggagctgcgtgacaatgcggtgaaaagaggagggcgaggcgagatgtggtcggaggtcagaccgaggagctccctgccgtcgactctggacgaggtcccgtcgtcctggccagcttctgaccatgactgtcgtttctgctgactcgaacttcttcagtccctgacctaactggaggcccggctagctctcacgaaggtcgcctcatgcgaccctgcctgcgtctacgctatgcgggcgtccgagcgagctaggcgagggagccgctgcatgccgtgtggcccgcacgggacggcacggcaaggcgctcccctcagccctcagcccccaatagacggtcccgtctcctgcctccccctcgaccttagcggacgcatgccaggctcgccagtcttggcagcgggccagaccgagcaagcgagcaagctttttgacgccgttgcctttaacgagccctgcagccgggtcgagggtcgaacgatcgaaggctcgccagcctcgactccgtcctctgagtcgcccgcccgcacaaacagatccccttcccgctccttgaccctcgactgagctttataagtcgctcgctcgcccaacctcgttcgctcttccgatctcattcccaccaccacctgcaacctccttctcctcgactcaaaatgcccctctcgctccgcaccctctcccgcctgctcgcggccgtccttgccttcgtcggctcgcccttgtccaccagcgcccggctcatctcctcaacgaccgggatcgccgccgcgaagcgcttcgacccggtcggctcgagcggctgcgttgaattcgtctgcccgccttatacctctccagagctgggtcccgtggaggcgaccgactcaggagaacaggacgctgggtcgataacggcatgcgaatacttcatcaccgactagtaggtatcatcctcgtctgccttccacgacgatggttccagacgctgactgcccttcgttcactcgtccacagcgccgacgtctgcgagtacaacacctcggacggccggtacatcggcgaccgggacgcatgcggccgacatgctgttgtccgcaactgcggcggcggtagcgctcgaggcggaggccgcggcgggggacgcggcgggagctctggcggaaggggcggcggacgcggaggaagctctggtggtaggggtggtggtcgcggagggagcacgggcggccgcggcggaagcacgagcggtcggggtggcttccggccttaaagcgtcggcaagaaggtcgacaggtcgactgctgagtggcccgttgcttgggcgctcgacggtcgtacctttcctgcggccactgtcgcggcacgggtgtctgcatctcttctcctcttcagttcttcggttcccctttgttcctggtctcctctttgaacgcatgtctgttgtactcgaagactttgctagcctgcacgtgtgcagcggcgacgacagccctcatgtgggaatagggaagatcggtcgagcgcctggtcgagcgctcagtgtcaagccttcgaccctcgatctggcgcctcctccaaacggccttgactctcattggatactgaggacgagtgacggcgactgaggagcgagattgacgcgtcggtactaatcgagaagctaggaaagacaactgcacatctgtacacaaccaacggcccaagaggagtgaaatgtcccagagtaggagacagacaagaagaccaagttcaggcaaagctgaggcgatcctgcccgcaaacaaatgaagcaacgtcagtcgagaatacgagacagacgaggggaatacgagacagacaagggaagagggtcaaactcacaaagaaatcactttacttgcggcccgtcttaggtcccttccactgccgcttcttgacctgctcctcgagcttcgacagcttgcgccgcttcttcgtcgggcacgtctgggttgccgtggccgggcaggcattcccaccaccatttgccttgatgccggtaaccgaattgtatgaacaagtgagctggacgctagcctgtcccggcctgaaggacggcaggaagtgaggcgagtcagcgaagcttgtcttcgagagcgacggactagaggaggaggactcacaagacatattcgcactgagtccgcactccgttctggacctcggttccctgagggttaaggacgacgaacgaaccgatcgcggccgggcactggaaaaagcagctggggccggccgagggctggaagcgcttgacgtattcgacaccggtcgggccttggatgagcccggcgtcgaccgatgaggtgagggagaggagggaaaggaccgcgagggcgtgcttgcggaggaagggcatccttggaggctggtcgcggggcgaggatgaggtagtggagtgagaaggactgggcgggaacggtggcgggaggaggaggtagggagcgagtcatcagcggtctgtccctcgccttttaagcggttgataggaggactgcgggaagaagaggtcagcaagaggaggccgggcatctcgggcaagcacgatgggtcggtgtcgaggcgagcagaggaggctgctgaactctgtctttgggcctggcggtgagcttgtcagctcgggaaggtcaattcgtggcgttcggtgtcgagacagggccaggcagcgcccgtcaaagtcgagaaagggggcgagcaagacgatgccatttgcggaaggacgggacgggagcgttagggggcgacgacgaaagaaggtatggaggtgaagctggcgcgagcctggaacgtgacaggaataaggaaagacggcatcgagtggaacgactgtagcagtcaggcgaggacgcgcgtgattacgccctgggtagggatctaggcgtcagcaggcgggcgacccgagggaggaagaggcgggcgggagacgacagaccaagcccttggttttgccctcccgaaagagcagcttgtcaccctccttcacgaactgtttgcgaagtggcgtcgaggaggtcgcggaatcagtcaaagcttgagctgaggtcttcgagacgaattcgtgtcgcaacgcgagactcgaggggccgactgacctcgggcgcggagacaaactcaaagacgacggtgcagcggtcgcccgtccgcagcaggccctttgggtggtccatcgtgacgattcggcacgtctgcctgaccgcgcccgtgtgcatgacggcctggtagcccggctggatcgtcgtgttgtgatagaggacgagcacttggccctcgaaccgccggacggcatgcgggagctcgcccgactcgggccgggcgacgatgaccattcccttgcgaacggccgtccgccgaacgcgctttagcgcaaagctgtaacaaggaacgggaggctacaaattcaacacaaagactcaaacgagcgcctgcgacggggtcgaaaaggacagagagaccgacctaacgctctgaccggcctcggcgctcgaaacacttgcccgcttgcgctggatgctcttgacgcttgtgctgacaaactggccgaggctgtcaggcccgagcaggaccgtgtcgcccgtcttgaccgtgcctgcattgaggacgccgttctgcgttttcaagccacgggtcaatgcgcgacagatctgtgtcagcgatgtagtcggttggtggggaaacgcttctaccagacgtacgacgacggtcccgacgaatggtacgctgaagacgtcgctgatcgagtactcgagcggagcgtcgaccgcgtatcgcccaacgccgctgctggacgtgcttgtcgacccgggggcggccgcctgtgtcgaggtcggcaagaggttaaggaacgaccgcagaagcggtagcgactcgcctatcaattgcgacagaatgtcaggattgcgcggttgccatgccaggcatcgaggaagagcagagacgcaccagtcacattggagaggaggaagatcgggcagaggcgatcgcggacaaacgtctgcgagagctcgacgacgtcgcgggcgtcttcgacaaagacgggcgtcctcctgcgggtcccgtcggcagcaaggccttgggttagcctcagagcgaacgcttttaggatgcgttaaatcagggcggacctgcatccgggcgaccggaggatcttgcccagctgagctttcgtttggtcgagcacgtgcgcgggcgtcatatcgatcttggtgatgcagacgacaacgggcacgttgagtgcaagtgcgacagcctgcgcgggatggcaagaggggtaggtcagcggagcgccttccgacgcagcatgacagcggattaacgcacgagatgctccttgctcatgccgatcaggccggcgttcgctccgaccatgagcagacagtagtcgggcgcgcagcccgtcatgccaaagatcgtcgtcttgaggtagcgctcgtggccggcgaggtctgcgtggaaggaagcgagtaagaagcgcgtggagtctgtcaggatgagccagtcatacgacgtcgaggggtttgcaacgcaccaatgaagctgacgacctttgcgctccgctggcagatctcctcccagccgagccgctctctccgaccgccgatcgacgtcaccaccgccgtcggcccgtctgccgacgtcgcctccgctgccgctccacctccgaggaccggctcgcccttcgcatcaaacccgaggatctccatcccgacgctactcgtccggccgctctcgagctcgtgcttgtgccggaagaggctgacgcgtgcccggccccggccgtcatcgaggcctccgcgggtaagtacgccgagcgtcgttgacttaccggcgtcgacgttgccgacgacggcgatgcgcagctcgggcaggtgctcgagcgaaggtggaggcaggcgaaggagggccgttgaggaaggagagggaccgtttgaactgaacagagttgtgagctgaagagcgagagacaagcaagaggtcgaattagctcgcggcttgatagccggaaggaaggagaggcaaagaggatgcgcacctcgccaccgagctcggccatcgcttccctcagccggccctcaagagtcgccagctcggccccttctggcagagcctctccttcccactcaaccgcctcgacctcgccatccgctccggatgaacctgctgagctcgaatccgccgctgtcgctccgggtcgcactccgcgtttctcggcgcggtaccagcctcccagagatgccctccggcctagaatgacgagcatctcgtgggccgggttctttcggagggcctgctcaagcgcatcgaagagcgctgagcgggctgtatcggaccagggctcggtgctggatgggtaaaggagagagaggagcgacgacggaagccggctagcgatggtcatggatgacggggtcgactgcgcggcggtgctggatgacgagccggcggtcatggcggtggcggccgtcgttgacgaggtcgcacctgtcgatcctggtaacgcagccgtgccaatgactggcgaccgcgtcttggcgcctaccttcgacgccggcccaggcctcccctctgttgaaggagtcttcttgtggccagccttcgaggctgagctcgccgatgagaagctgccaccgggcgcagccgctgttgtcgccgtcgccgccgacgcctcgccgagacggtgcttggccgtcgcgcgatcggatatctcctgaatggagcaagttagacgatgatatgtgaaggattgcgagggcatcagctctggacgagtcggacggctggcgagtaggtggcgacgtgggtccaagcgtcggaggtcgggcgacgtcggctgaccctccgacgcgataaaggcagacagacggacctggatctcgctctggaacttgagcatgggctcctctctctgtgtgtgcgctgtcggctgtcttgaggggtgctgagtttcgaggtggctgtcggtagacgacgagtcaggcgtgtcgccggccgggcatcgacgagccatctcgagccgagcacgcgggggctccgctcgattcccgaggggtcatgatccagctgctgagcaatcatgattaaccggggtggctcccttgactagcctcagcccgcccgacaacctcgagcgccaaccctcggacgaccagcatcttctcgaccctctcgactcgcccgctcgccatcccagctcgccgccgcgatgggaatcgccttctcgcaaatctggggccgactctttggcatggacgagatgaaggttggtcttgggcttgcccggccaggctcgagggtcgtgacggccgtcgagacctcctgcttcgctcgagtacctggccctctttcgactcaaggatgttaacttgctgcttacaacccttctttgatgcatcagatcctcatccttgggtacgtctgaactcctgcatcctcattcggtcggccaagagtctctcaggccttcctcatctagctcgagctgccaaagccggcccggctctcggctgcgcatgactgccccggccgactcgacccagacactgacgagctcgaatggcttcctctcccgatcgctcgacatacagactggataacgcgggcaagacgacgatccttgttcgtcccttccagcgctctctgaacgccgcgaccggcggctacgtcggcaggcgaaggtcctcagccgctgccatcggcctcgggctgtacacacgagcctggcagctccggttggacagaagcactccgcggctcgaggtcgcatgctgaactctgggcgttcgagggcggtctcgacagcgggatggcggcggcgctctccgaaacgaggctgatgactgcgccttctgtgtctcctgtccgccgactgcagtacaagatcacgatgggcgaggttgtcgcgacggcgccgacgttcgtccaccttctccttccattggctcggcctctgcctagacacttacagcgctgcccttctgccgcgcatcaacagggtcggcagcaatcaggagacctacactttcaagaacctgaggttcaacctctggtgcgtcacggatcgccgctcgaaatgcttctgagtcgcttcgaaacagcctactgacggactcttgctcttcacgcgcgcatctttgcctaccctcgacgtacgatcgcggtcgacagggacatcggtgcgtcgccgcctccctcctcctaccctgagcaaactgacacgatcgctcctgatcattacatcctgcctcttgcgcgcaaccaggaggacagaccgccctccggcaaagctggtcgcagtacttcacgagcgcgcgctgcatcatcctcgtagtcgactcgaccgatcgcgcacggaccgggctcgtcaaggccgaactagccaagctgctcgaggcagaggtccgtctcacagatctcaagatcgcaaagggcatgatgctgatgcttgtctggttgctctcgacttgcaggctttgagtaagacgctactgctcgttatggccaacaagcaggacgtcaagggctgcatgacggcgggcgagatttcgcaaagcttggcgtacgtcccccactcgcttgcgctttggatctggtaaacgctgacagctttgcgattcgcagattgaccgacctgaaagagcgtacgtgccatttgcaactgaatgatgactgaccccagcttagctgacatcgcaacgtattgctttcgttccttgcggcaggcgagtggcagatcctcgcgacgtcagccctgacaggccagggtacatctgctcgcccttcttcgcgttcgtacggggcttctccacgcctggcctactgacctcctgcttgctctcacccctgcaggcttggaggagggcctcgactggatggctacgagactcgcggccaagaagtgatgaggcggtggggacgatctgatgctgtctgtgagctcaatcgcgggcgatagtccgaggggccatattcatcggtacctctggctgaccagagcggtgacggctcggcctgtgtgcgataaaacaagccggcctgatacaagagagagaaaaaaggaataggtgcaatataggaccagcgaggcaaaagatcctttgttgcgagattagcgattccggcacaagggatcatcctagtctgttcgacgtgtcagcaaacgcgcagaaggacgcagggacgagggtgaccagatgaacgcacgcgtcgcaggtaggagggatgggaggggccggtcacttttgcttcgccgcccggcgttaggggttgtcttggcgcgacttgatgcgctgctcgagcaggttgagcccgcgccgcttccgggacgggctgcagttggcagggagaggcgtgacggccttcaggggatagtgcttacagctggtggacgttccggttttccggttgccggcgcggatagtgtcgccgttgtcatcgaatcggcacggaaccccactgttgccactgcaacgaccagcggatgttgatcagcggatgacttggagctgcggtcgacgaacagcgaaggccagacgaactattgacacatggtgaatggaacttggacgggcatgccttcaacgacgtaagggtggcggccgccttcaagacccgccgggtcaacgatatcaagcgttgcaccgttgacggtggttctagttgggcacgaccatcggcagttgctcccaacaggtgacgcagcgaatcgcttgacgtatttgatttctgtcgggccctggcggagctcagccgaggcgaggggggcgacggcggcgaggaaggcggccagcggggccgcgaggttggcgagggaggagaggagcatggcaagggacggcaccagaggcaggaggactggatcggctgcggtcgaatagaataaggcgaataagagaaatgctaggggagagggtgaggggaagaagagacatagggtcagtcttcggtctctccctttgagaagcccaggccgctttacatggccctgaaaagatgcaggttgaccgaacagcaggccgagcgagtaacgctcccctgggcaggcagcatgcagctcaaaaccgcgtttgacgatcggacgtgaagggggaggcgcgtcgagcgcgggagtaaccgcagtggcgtttggcccgggatctgttcgcttggccaacaactgaccgagagagacccgtctggagcagcccccgtcagagcagcacgtcgacagagcagacatcctgcgtgggaagcaagccgcagcgagggcgtaaagtgaggggggcagcctgctgggctagacgggtggggcacgacgtcgacagggggggggggggggggaaggggggggggggggcctggggggggggggggtcagacgctgcaggagagggtgatggttgggcggaagggccgacgaggtcgaaacgccccgccaaaaccggccgacctgcaatcgcccaaaggagcacgatttcagcttcaatacagacggctgacctcatcggccaaacacgcccgccggcacgccagaacccagcacgagagcgcagactacctgcgaggctgatgcaaccgtgggccgctcactcggcgacgtcgttgcctgccctgccgttcctgttgccgcctcctccgccgccggagaccgagcctcggacttacgcttgaggtcataaggtccccccaggcagagtggtggagggaggcgatggagaaggaaatgcggtcgttagaggaagcacgcacctttgagctggccgagcgtccgccaggcgccaaggtcgtcgggtcgaagtgggtttacaaggtcaagcgcaacttggacgggtcaatcgacaagtacaaggcgaggctggtggcccagggcttcaccgagcagccttaggagtacggcgagacctacgcaccggtcgtcaagggcacgagcgagcgcatcctgctcgccctctcggccgcctgggacctcgagctgcacagcatggacgtcacggctgccttcctgcacggacagatggaagaggaggtctacatcgctcagccaaaggggtttgcggtgccaggccgagaagacgacgtcgcccgcctgacggacaacctctacggcctgaagcaggcaggacgcacctggtggtcggcaatggacaagactctgcaggggttcgggttcaagcggtcagccttcgaccactcactctaccaccgaaacggggcggacgggctagcgctacaaggtcaaaagctgctggaacggtggggcatgtcagagtccaaaaacaaggtgctgcttccggccaagaccagcctgcccgccctcgacgccgcctcgcccgaccgactcccgccggccgaagtgacgacgtaccagtccctgttgggctccgttcggcgacctgctgcatctcgccgggcggcgatgatgcagaggtcgcggggaggtgttaacgtgttgctacgtcggcgccggctgggcgcagcgcgggaacctgggcgtgccgccagcgcctggcgaccgcccagcggccacccgggcgccacgccctggagtccgccggactcttcactcctctctcttttcgctccctcctcttagctagacgcccgctcgctccccctcctaaacctcagtcggtcacggagtagtcctgagactgaggtacgttcgccccccctagtctagcacccctttagcctaggcagtagctcaccctcactgtagtcggccctgctttctgtctcgtcctacaggtgggatccatgagtcgttcacggagtagtcctgagactgagtcggccctgccttgtgcctcgtcgctcacagtgcactcgacctcgttcattgcagcccgctgctgctgactgccgaccgctaccctgcccactcgtcctccgagggcactagcgcctaccccgacggtctgagaggtgcgtccagttcgtcttcggagaggacctcggcggagggtggctgcggcggcggcggcgagaacgcacttggattgttctgcaggagttgtcccttgacgaggcggcagtggacagtcaagatcattaccggtgttgacaacggacgcaagctcattcttttctgaaagcagtactgtgaggacacctcgcgctgtgcttttgcgacggtacgctgaagcgagggggagaagaagacgcggttggccgaactcatagaggagaaggcggcggagcgaaaggtgtcgggccacgtagtgccgcaaaagactgcggccgcgaagtgcgcggccaaggtcggcaaagatgagaagccggtggtcgaccaggagccggcgctcagcaagcgtagcaagctgtcggccaacgggatgtcgacgacatcccggactcgccctggctgcgggcaccaactttgactcgaccaccgaaagcgacctcaacctagcctgcgagaacgacatcgactcggccagtaaaattgactccgagtctgaggccgagggaagcgtccgactgatcaacataggacgccagtggaacgtcgacaccctgaccggtccctctggcggcaatccgaggcgagtggcccccgcaagtccatcgcgacgtcccgaatgaaggcggaagcagtggtaggggtgatgcacctcgacctcggccgccttcgtcgtcgggcgttcctagacaccttgcggtcgcacgtttgaataccgaaggtcggccgtatcgtcgatgccgtctggatggattgcacggcctatcagctcggcgaacccccgctgccacgccccaagccatcatccatccgctccccatcgccgaccccttctctcgctggcccgctgccgacggttcgaggcatcaagaacgcgtacctgctcacggccatggatcacgacggcctcgcctggtcgaactgctccgagcacggcgcgctgacgtactttcaacgtgctcattcgtatcgcgacgaccaacggaaatcccgacgcagtgctcgggagtaacgatgccgagttcctttccgaccgagtgaagatactgcttgaggggcagaggtcaagcatcactccagaccatccttaaactaacggacgccttacttgaaccgggccatcgtcgagtgtctccgggctatgtgggttccgagcgagcaggacagctgggaccgccacccggatgaggccatcttcgcggtcaacgttcacgtcaccacgacccgagactgctcagccttctgacttgcctacggtcgagggcccaagctccggcgcgagccttcgactcgctcctcgctcgccgggcctagcaggcctccgaggcggggttgagcaggccaagcaggagcgactcacttaccaaggcaatcggctcgagcgtctctgccagcggtcgaacgggaggcaaagcggcagctgaaagcctcagctaagggtgaaaggagcgccattttgcagaggctgcaacatcacattaaagccaacagatacgacgccctcgcaaccctgtcatcaaaactactcggcatgttttcaatgcaagcaaatgcgagagaggtaaacggatgaaagattaaactacggataatagcgttccctttgtgttgattccgttccctttttgttggttgatcccgcattttccttcaaccaacaactcgggaactccggtgacactctgttgcagtctttcttgccgttggtgatgatatcccgatacgaccggccaatcacctgtcattcaaacgccaattgcaggtctttgtcactgtctgtgtgctgcgacaagcctgtcatcatatacattcgctacaatcctagttttctgtgagaaagctaatgagacgtttggcgtccttacactcccggtttttaggatggctcgctctgctttgttgctcgtacaatgttgacagtcccatttttcctcattgcgtagtggactttgctggcgtctttttacagtggtcaccaagcatcgcctctttgttgtacgcgttacttttcttatttactgagcagacgacgttgcgcttagccatacgaataatgaagaaggtacaaagccccagctggcagctttgtacaggctagcgagcgcttatttacccgtgtcccaacagcggaaggagctttaagagatatcctacaattcgttcaggtcattggttgatgttgtatcagtgcttgaaagcaagaatagtcagagagattaagtcgcaacagcgtgttgggtgcaaattcaccaaatgtagtatcatgcgtgatccgatccgatcgaagaataaatcgtgaaaaatcgcgaatgttagttatttggctcagctcatcctatacacacaagtgagaagagacaagaccgattatcacacttattgaccgactctttgaacctgattgttagccgattctttttgtttttctttttccggtcggctatttcagcggactgagcgacaaggaaaacaaagggtctcggtgcgcgagcacccaaccagcatgtctggccagtttggttactcacgacttaagaggggggggggcgtacatgttaagatttcattcccaagtcaacatcacgcaactgatcggatagtggagatggtgtcccacatggtggctgatgaaaagaatttaggtatcgctacagatgctgatcaatcaccaagtacatcttgacatgatattcgaaattgcaagcgcccagcaactggttcaatatttgacgcggatggaccatcacatgaggcagctgtttgtcatcggcacgttagattggtgttagtaccgacgcagacttcgagcagcaaagggagcgcaagaggtgcagcaagacctccactcaaaagtgcgagctcgaggaccgtttgatgatttggccacattgtgctcggccgctgctcgccctgtgtcagattgacaacaaggtgatcggcgggagtaagtcgtgccgctgagaataacgattgtctcgacaataataggaacacacgccagcctcaaattgatgtgaatttccacaacgacgtttattgcctttttgttccagccaataaagcgttttcgctcgtgccgctcgcagcattatacttttggcggtttcgaacgctttagtagaccaagcgagggcttgcgcaagacattctgaaccccgtcacaaccgtcgaaagtcccattgcagcgaccatgagtttggtcatcccggccgggcaaatcttagtctttgaggtgtttgagcgtctccttaaagtcacgggagccggagtcttgcgccgattagctgtcacactctcttatgtagaatgacaatcagtcccgcagaccctttgcgcaacccgtcctcaactgtgagaaaaggcaaccctttgcccttttgtctagctggcgccatcaacctactacagcctgactggtcagggttctcacacagatgatgaccaaatgggaaggcgcgtttgcggcgccagtctcgattgctgcgcaatcgggactgcagacgttcacttcctttacactgctcagaaaagcggcgctacagcgccagctgggcagacggacggcaaggtgttctgcgaggcttgttcgaaccccacctccgttgactcccttaccccgcattattaagccctcttggcgttcttcatgatcgcgaggtccgccatggtctcatctcatgtgcagcccatgaactacatgtatgacttgccgatctgcgaaatgcgcgttgatatcacggcgccccaagcctagctcggcgttggctcagttggtcggttgcgcttggcctggcgcttcttgcgcacggggctcaaacggtgcagctcaacctccttcttctcggccattgttacagacgctcaacccaatgggtcggcgacagcgaagtaccccccgtccttgagcgagcgatccagcaagcaatgttttgcgctgccgcgcttggaatcggacgacgacaagccagcagtgaataaatgcagaggcggtagagggatcgggttactgcttcggtgggccagtcttcctcttctcggccttgccttgaatctcgctctttgtgacggaggcttttgctgccgcaggccgctgtctcgtgtttgcctcggggtcggggccatcctcgtcggccccgtcaatctcctcaagagctgacgccgacatcacgtccttgcccgttttcggccgaccgaactcgtccgtatggtcaaagactgggacgccgttgccggtgcctctgaccacagcatagcggtcaattccatcgtcttcgtcctcgtcgttctgggactcagctgggcgaacgtccgcagcgccgtcgctcaagcaaggtcggagactgattgcgggcgggcgctggataggctactgcttgttcgggcgaagcaagtcgtcgtactgttcggttgtgaggttgccccaacggagcagcagcaggtgaaaatggtatgagggcgaatcttgaaggggccggcgatgctcattagaaacggcgtgggaaagcagccctcagtctcgccgtcaagcagttgacaaaggcgcgaaagatgctgaggaggaggaaaaaggtaaggcgtatcggcgagagcgcgtgcgagttggagcgaacaaaggggacaaggagcaccgcgttccagcagtccgccgtcagacatttgaggaggtattgtggccactgaagttctcgtcgttcaaggcgagtcggtcgcagatgggctcttgatttgttctggaagaggaatggctgcctcggtgggcggcgagaggtttgttgccggtggctgcaatactcgctcgcccggcggatgtagccgtcgacgacgcacgtcttgctcgtacttgacgaaaacgggcaggtccttggcgtcgataggtgtctgttagagatggccggataatgcacgaaaatgatggtagggggcggggcgggacagactcggagtcagatggggtactaagcgccgaacttacgaggtgctcgagcttggtctgctgggactgcagagcgaccgtgttcccctgcgccttgtagaaaaggttcaggtggctgtgtgtgtccacctggatcaagaggggcagatgctcccttgaaggacacggtttaagagaagccttcacggcggccttagagatggccttgaaggacagcagtgccacggcttggcagggcctagctcaattggctgggcgaggcatcgcggtttttcagctgcagttatgctgcaggatgtcttgccacgcttagcacggacagccacatactttgggtcggtgcattcattgttcctgaagcagagaagacgaggggctagtgtcagccaggcgctcaggggtggtgtgggtgcgaggtttcaaagtgccggccgggcgagctgggcccttccttgatcctggttctgtagcgggcgagcagcaagagtcaggactaagcgcattaggggagggtggtctgaaccggacaaacattgtgcgcctgtcgttgccggtgccgtagatacgcgccttcggtccgccctggttgtcgccgtcaaagttatcgagccatgaaccttcccacttgcggtcgcttatgctctcctgcttgttcgggccattggcgttgagggcctggagtttcttctcggagacgcggacctgatgccaaagtttgcttggagtgaagatgtgcgcgccgcctatgaagctgaggacgaccgtcttggtgaacgacacctgccgatccggtttgcgccaatgcagcaccacctgagcttgaagagataggctgctgtcagagccagactctcatcggctcctgggttttggaatgctggaagaggacaacgaagggaatgacaaaggtgtcagtctcactttgtatcatagcctgcgagaggggggtttcgagcgcaagacttgtcgcatcgtcgcctggaggcggagtaggagctcccaggagttcctcgacgaggctgactgctcgacgcttgcgtctcccacgatagctcgcggatgtgctctgtcgaagccgctcgaggtcagtaaacagaggtcttgaagacgaggaggaggcaagggaccagaggtcggcgaccttgtgatagaaagcaatcaaagcgagaggcgcgcgagagtacggcgtgggtcatgctgctccagtcgcgcacgggcttcgcgacggtcccgatcgaggtagtacaacccgtaagtaccgaaggcggccgcgctcgcgctcgtgatgagcagtaggcaacccggcgacaagacagaggcaaggccttctcaaagactcgcggaatggcgcgcgcatgcatcctggcgtttgacgagctgcagtcgagaggtagtcagcttcttcggttgcccgggcagccagaagacgagtacatagtcgttagacttcgccccaacggcaaagagctgaacattaaccgcgagcaaagaaaagacgctgcatttggaccctagagtctggagccagcgggcgtggtcgtctttaggcagcaaaacgagattttagccggtctgcaagcggagaccgccctttttggccggccgctgatgtcgacgaggtgattcgaccacgcgctgtgttattggacaagtggcgagcaggggggaggctggagctctgacgggcaaggacgagtgatggggggaacaaagaggcaagcttcagatttaggtggcgactcgatcttctggaaggctgtgcctgctgacggatccggtggaggtactgactgatccggtggagctagtgccggagaacgaccggcgaccgagggttgccgggtctagactcggccggtggcgaccgggtgtggccctgcaggttccacgtggaagttgtgacccggtgacgggtggggaactggtagtgtttgacttctcttctaccgtgcgggctgacgccctgggttcgaaccgcgagccggggatctgctgttcctggcaggccgaaccatgacacgctgccagtgtacgcccgtgtcttcttgacgtcgaggcccttgaacacgaactcaccgtcagccgcgcgcggcttcatgaagtaaaggtgattgaatgaccgcacagacgagcctcgttgggactggcagcgccgcaatatcgtccgagtcgaccggctcgtccgcggccagcgctttggggatgcggacggccttctgcggcattcattgaccgagtgatttaggctgcgacgagacgggcgtgcgcgattgggaagggcatggaatccaaacggatggcgaggctcgtactgcagttcgggaggccgggtcgatggaccacgccatggtcggctggctgccgagtgccaccagtttggtgatgttgtctcgatttagtgacgtgtttgcattttacttatatgaggagtgcgagagagggagagaggaaagcatgcaccttggtcttgaggcgggcgcctggaggtggttggcgagggtggcactcacctgtcctgctttcactagtgtcttgctcagaaggcggagacgacggcgagcggcctcatcatcaacaagcgcgtgcgcgacttccttcaaggcctgcgcagccacgaaggctacgcggtcagttctagttctgtcattaatgtgacagccgcccttagcgctgacgaaccaccatttgccttccgttgcttatttcgcgtgtcgcctgcagcagccgatcgtctacatgtctactcaaatcgttcgccgggttccttgcaaaaacgaaggaaatgtcggtcgcattctatttttcactcatacggccgccgacccagtacatcatcctgaggtcacctggcaaatgtggcgatagggggtactgatgccatattaggactggtacacatgctggtatggtacggtatgatgtactggtaaggtactggtctgggtactggtatagtattggtacccattttggtctggcacctgttcaccctaccggtacatttgccgggtgaccttaggatgacgtaccggctcgacggctgtgtatacgcggtgaagatcattgccgctgccaagtcgattgatgtcagcatggtttcgttgtaacttggatctagaaacacccagcaatgtatgaggcgccagtaaagcgttgtctgggcgctaaaaggaccaaggcatgcacatcaatcggagtttggacaaaaggagtgcttcgcgagtcgtccgctgaccttcgagggctagagcgggccaggcggcgatgacagtatcctatccagcaggaagacagcggcctggcgaggtttcaagacgactttgatgcagtacgtcttttcgacgtacgtcgggctggtggtagtctgattttttcgggcgctagtcgttctgcgactgctttgggtgcgtatgtattctctcgtccggcctctcgattgaaggttgctgattacagtttctatcttttcggaggccaccgtgtcgccgccctcaacggtcactaccgaccatgaccgcgcttccgtcggcttcgtaaggcactcccagccagtgcgagcaagggtttaattcgctgagctcatagccccggcagtcgtttcatcaatcccaaacagtgctacaagaggatggaggccagacgcggccgtgagcagaacccagagttgcctcgcgtcgggtgcgatgttttgaagcaccaactcatttgttggtcgacggctcgcggccccattgactgctacagggccgtcagtcgttcatgcgcacattacccgatggcgaccctccgctgactgaaactgtctgccccccgctgtctacgacgccagacccggcgcatttacaaagctcccagcttcgtctcaatcacctgctaaagatttcctcgtgctgacggcgttggcagtgttgacggtggcgagcagaaatggagcaagagtcgaagccagatagaggcttcaagaccactcgcggttcgaccatgcgcaatgactgtgcaaccttttgcaacacgttcagcttcaatgtcggtctcaaaactgttgagctaagttttggggtcgtctcaattgcatctggcgctcgaagcgccggcacgaatgatctatcggcgacggagcagaggcgacagcgcacacgggcatttatgtggcaatactatgtctgttgactctttctcttgaacgcccgccgtatctgaggatcagagagtctaggagcagggcaccagtctgcgtaattttgaaggtcaagacgcacaagactgaggcaggcctaggggggtgaatgttgcggccctgctcgagattgaaaaagcgatcaggccagaggagcgccttgcggcgagggtgccccccggtgaggtccgagacctagatgttgcaaaatagagtttgtacgataccctgccgagtggcgatagagacgcgggtcatggaaaacctcgtccgaccgagaagggtgttgtcaaatctccatctccctcgggggaaatgagaggtcggaaagaggtcgtcttgctgcttaaccaaatacttgcgtgtagtcgaggagctgattgtcaccgtctcggttggcaatgaactcgggggagtagtcagcattccccttgacttcaaatcgagcgcattcatggcgcagtagcggctgtgaacggacgtgccacagttggcagaaaagacattgcagcgttcggcggaatgtcgaacaggacgcgaaggtctgagagccaccgatgctgtaacagaggcaagtatgcggtgagcaaagggaatagggacccgtaaacatgtacatgtttcagtggccatggaaaagaaatggtgacggccatgaagcatccatcattacctgcttcccagttccgggaggcgatggacattggattgtaaaacgggtgcagctggtcgtagaggggatgctgaccttacaagaaggagacggctgtcaagcagtcagcacaggtcaaacaggacagtagacagcgaacatggaaagagcccccgcgccgacttgaggggcggggacggcggtggcatctcgtgctcaggctcttctatgctaaatctgacgcgagagagtcgtttcgtccactcatcgaacagcttgatcagatccgggtggtgtccgggtcacgtttcaattgcggaacaagatcgctggcgccagcgacacggggacgaaaattgcccgacaggtacaattacttcgtgtaggagacatctctagatgctgtcctgtatactcctggtgtcccatctccatgaccgatcctatcagttgttattaggtagagactcaggttgttgctcttcgtacggctcggcggtatggagtcgagcgcatgaccgtcggcacgccactctctgcaacacaacagcgtcgatctaacaaggtcaccgcagacacgcacacctccgtccctttgggaggctggagcagctaggcgcagtcgcttcaaggcgacagagccgtgcgtacaactcgacgagttctgcgcctcccagctgatcggcccgcctctttcgacactgcaagcaaacgcctcgcttcgctcgtttctgacggcgaccttatcaccggcccactaccatgagcggcgttgtcgcaacttcgccttcctcgtcaagtgagactcgtccgcttgtgcacagggttaggcaaccgccaagcgcgccggctcgatgacgaaggccgagctgccctcagtctaccgctgttggtcgcgccggtcacgcccggcggcctggccgcttccaaaaaatggcgtgatggtctccgcttcccggccttccgcgacctcacccacttctcaatgctgtcgacgaggccggggcaagtttggacctgataacggtgccctcgtacaaggtgatcggtgcaaagggcaaagaaatggctctgcgttgcagagtgccgccattcagattgcccagtctcattcacgatccacagcggtggttgtgcgtggtgccagacccgtgacagttacaagcatgaccacagcggccggtactcgcagtgggaccagccagctcggcgcggtgtcaagtcgacgagcatgaagggaattttgctaggactacggcaaactctctactctgactagtacacggtcaaggcgctgcactcggtttgaggcgatggaacccgccttgccaatgtcagcaccaatgtgcccttcgtctgccacaccgaggccgtcttggcccacctcctcgctgccagcaacaatttcctccaaggcgagcacgagcagggcgtctcgtggctcgctgctgccgccacgatcaagtgcgtggcaattgggtttgcgtctcattgatgtccgctgactgccttccccgacttgtcttgcctgccagccacacctgcatcggcctcggccggaacgtattcgcgaagcgttacgcgacggactcgaccgcgttggcgttaatcgacatgtccgacctgccgcacaagcttgtatccatggctgcatcggtcgagtgcaacattgaccgcagctacgcccgacgacaaagccagcagccgcagcccgtcgccacagcgcggccttgctaccccttcacacggaacgaggtgagagaaagtccctaaggaagcaccacatttcatgattgccggacccgtctgttcgaacgattgcacccggcttgttgtgcccgtctcggggctgttagcggggcacgagcgacggatagggcggcggcggcgagcggagctcaattttgaccagactttgagaccgccgctcgcgccgcgggcggctgcccacaaggttcacatagcctcaactgagggcacagacctcattcatcgaacattgagtgtgtcaagcagaagagttccaaatcgattgtgtcccctgcagttcatcggtggcgtgtcgattgtgggttgcattctcagcttgcgtgactcgtcgtgcgtgtcccagcagatcgggtgagcaccttactttattcaaatttggccaacaaggcgccccgaacagattgttgcctatggataaggggaaaggtccacgcgggttcagcaaccgaggctggatggtaaaaaagttgatcaatagcgggatcgaaccgctgaccttggcgttattagcaccacgctctaaccagctgagctaatcgatcacttgatgtgttgactatcaatctaatgtttgaaacatcattctttgggctactcagcttaccttctttctctgcgactttctctggaagccttgccaagctgcaatcttcttcaggcgcttagtaccgaggtcgacgtcaggtacttgacctcatctttgaccaggtgccactgtccggcattgctgccggcccatatcctcgtcattttgggctcaaacgaagggagggggactgggccaattggaaaaagcgagagagggccgaaaccttggagattgtgggtcggtcgggccggtcgagagttggaacggagggggttatcctaaaaaaaggaggatgtgcagaccgattgcttcggtccacctagttctaaagagactcagacgctcgaagcgttttccgcgacacctgagtgtgttactgaactcccgcggcgaagatgtaggtgggtaccgagagcaaaaggagaaggggggattacttgtgaagactatagccctagctcgcagcttcgtcgacgccgtacgctcgtcaacttggcgttgtgccttagcagggttactccgaggggccaggagctcgcgatcaaatgacctcccgggagatggtcacgaattgcaaagacaagcgtccttgagagggtctttgtaagctagatcgttcgacgaacaccacccgccaggagtggtcaatggccaggggctgcagagcagactttaccaaggtcggcagaaatatagtgcaagcgggtcgaaacggaggtttcaacgagctgctaaacgctgagccgcaggctccggcgagtgaggtgggaaaggtccgaaggttgttggttggttgctggttggttgcgaggtggcgaggtgagagcgccagctggaagcttgcctaatgttagggtgcaagtggcgaacagggggaggctggagctctgacgggcaaggacgagtgatggggggaacaaagaggcaagcttgagattcaggtggcgactcgaggtctacaggggtttaagtaggctgaagtgtgatggcgaagaatcttctggaaggctgtgcctgttgacggatccggtggagatgctgactgatccggtggagatgctgactgatccggtggagctggtgactcacgccggcggagctggtgccggagaacgaccggcggccgagggttgccgggtctagactcggccggtggtgatcgggtgtcgcgctggaggttccacgtgaaagttacaaaccggtgacgggtggggaactggtagtgcttgacttctcttttctcgtgcgggctgaggccctgggttcgaaccccaagccggggatttgctgttcctggcaggtcgaaccatgacagcggggaaccgtcaacggccatcctgcaggcccttttcgccgggaccgaacacgcacagccggtcagcttcgacggcccatgcgtagcggccttcgtcatggccctcgcagcagctcaccaggcgggccccccccccgcaggctcgcccgcaagcgctacgcgcacgacgtccatggggtagtgcacctccagtcgtgctaccggcggcggctcgcgcgaaaggagctcaagcagctcaagatcgaggcccggtcgacgaccaagctcaaagagatttcgggcaagctcgaaaacaaggtcgtcgagctgacgcagacgctccagaagcgcgacggcgacaagaagaagctcttggctcgcatcggcgagctcgaggggctccagctggcgtggaccggccggcacgaggaagcgagcagcaaggtgcgcgagctgcaagacgagctgcagaagcctaccgtcccccgggcgctcttcgacgagcttcagcaggccaaggcctcgacggacggccgccttggcgaggcccttaagggcctggccgagaaggatgctgccatcgccacgctcgaggccgaggttgcgcgccagacgcagtcgctcgccgaccggcagagccagctcgacgcagcggcctccaaggcgagcgacgacgcgaccactgttgaagggctccggaccgagctcgccggcgttcgcgagtcgctcaaccgggtcaacacgcttgccgcccttagccggaacgccggcggcggcccgtcgtcgttgtcgcccaacacgcaggcgctccgaacgcttgacaatggcgtcgtcgaccacttcaacggcctcaacggcctgcctgcgccgcctgcgccggcgcacaaggcccacggccggcggcactctggcccccaggcggccgacagcggccgccagcgcgactcggccgaccagctcatggtcgacgcccgcaaggcccaggcgtcgcagaaccgggccatctcggtcgcggcctttgcgcccgacgccgtcgcccacctcaaggacgccaacggcctgccgatggtctttgacagccccgaggagcagattatgcagatgctgctcgacgccgagcggctcgacgaggacgtcctaggcggcctcatccggtcgctcaagattcccgtcccgtcgctccaggccctgccgacgcacaaggaggtcgtcttcccggcccacctgatcgccctcgtctcgaacgagatgtggaagtatggcctgatccccgaggccgagcgcttcctcgccaacgtcatgcaggagatccagaagcacctgctcgtgcgtgtcctctctgcgtctcgcccctcccttacctccttcttggactgacttcgattccacctccccccgacagaccttctcgtacgacgactgcatcatcccgggcatcttttggctgtcgaacgtccacgagcttctctcgttcgtctgcgtcgccgagcaggatgtcctccagggcatcggtcccggcaacgacgaaggaatcggccggccattcgagtgggagaactatgagcggctcgtccaggtcgtcaagcacgacctcgactcgctcgagtacaacatctaccacacgtggatccaagagacgaagcgcaagctcggaaagatggtcgtccccgcgctgatcgagagccagtcgctgcccggcttcattacaaacgagggcggcggccggctcttcagccggctcgtccagggcagctcgggcccggccttcagcatggacgacatcctcaacattctcaacaagatctggaaggcgctcaagggctaccacattgagctctcggtcatccagcaggtcgtcgccgacctcctcaagctcatcggcgtcaacgccttcaacgacctcctcatgcgccgaaacttctcttcgtggaagcggggtgcgtgccagctttctcgtcgcccgtgtctctctcgtcctgaccctcccccgcccgccccgaccctttcgtacctcgcagcgatgcaaatccagtacaacattacgcggctcgaagagtggtgcaagtcgcacgacatgcccgagggcgtcctccagctcgagcacctgatgcaggcgaccaagctactccagctcaagaaaggctcgctcgccgacatcgacatcatctagtgcggcccctcccgcgcttgctctcaccctcgcgtcttcgcgcgctgatgaccttccatcctcccctcatctttccccgcccgcagcgacgtctgctggatgttgacgccgactcagatccagaagctcatcacccagtaccatgtcgccgactacgaaaccccgatcccgcccgagattctccgggccgtcgccgcgcgtgtcgtcgccaacgaccggaacgaccatctgctgcttccgccggagaacgacgaggccgggccgtacgagccgccgctgccgcgcgagatcgactttttggagacgtttgtgccggcctacctcaatgtgccgcacatccggcgctttgccgttttgctcgcgccgtgaccgggcgtcgtgcacgcacccgctctctcttccctcccctcctttgaccttagcagctcacgcccccctcccttctgtcgatccctccttcccaagccctgtcccaccagctctctcacgccccctcctctctctgtgctgtccctcgacgggaattgagacgtccccaggcaaggggtacatgcgatttgaccgaatattatcggatcaacacgaaactttgcctgtctggtcgctcaggaccaggcgagatgcaggagactagtctgccggcgattcagacacaggggcggccggaaaaggacgggaacgggggtccggggatcccgcccctgggcgggccggatcttttcgtcaagatcttaccggatcgctacgagaccgtttcgaaggggggggttgagcgcgcgcgcgcgggttccgaggcgcaggtcgtcgggctgctgcgcccgcctgcttcgccttgtcgcccgcccccttcctgcctgtcaacaacgaccatcaatcctgagagcagcaagagtgtcaacagggtcagtcctgtccgtgttgtcgtgggcccggcgctaacctgttcccccgacgcacgcacgcacgcccgccgccaactcgctcctcctcttccgccccccggccgtcagtagcatcgccatcaacctggtcctggctcgctccctgcgacagatgcatccctgctggtctcatcccaggtcgtgccggcggagagatggagaggaagggggagcatagtggagcaacaggcgggaaggcgggggggcggagaacatgaagggagaagaaggcaggcaggaggggcgagctcgttcgtacaaaagtgaagcaggcgggcgtcggtggtccgagaaggcagagcaaccggcgaagggcgagcgggacaagggtgtaggcgcgaaggacacagcgataatccggcctactcgccctttatctttccgccctcctccccgtccaccgacatccccacatctagctcccgctcctcgcgcttgacctcgcccagcgccgcccgcgcctcgcccgtcgagcgctcaacctcggcccgggtcgctttgagcaggctgtcgatctcgcgctctttggcctcctgcttcagccgctgctggtattgggggagaccaaaggactcgcttgcgcgaccgcccttgccgttgacgtaaacgccgtcattgccagctgagtcggcaaacccgaagtcagcaaatgagccagggagcgccgccgaccgaggcgtcaccccgaccctcgtcccaaaggaccgcacgagcccgagctcaggcgcgagcaggccaaggaggtcggcttgggtcgcgtggagggcggcgaggagatgggtcgccggcgtcgttatcttctccggcgattccggcgctctttgggcgcggcgttcgcggggagacgacggacagaggaaagggagagagtgtccgaaagggacgcgacgcgacaggaaagggacgcattgcgcaacgaggaggaagcagagcagggtcagacgtttcttcaacgctgacgcaggactcgaaagcgagagggcgcgaggcggaggcgaaggcggacgtacgaccggaggtgggccgtcaggcggagtgcgacgaagctcgcgacgagcgcgaggaccgtgaatgacgcgaaggagagggcgaggatgagcgccggaatcaggaggcagactggcggggcgggcgggtgacggagccaattgagcgggtgagtgagtcgagagggagaaagcgagggaggtcggtggtcagcctcgtcggtggccggaacttgcgatccggaagcctcgcgagtagaaagcacgcacgtccgacgccgacgacaccaaagaggaaggccgagacgcagacgctcgcaaagaggacagtcgagccggcgatgaaggcgataaccgacctgccgcgcgtccgggtggaatgggtcagcgatggcttctggtgtaggctgagatcggcgggcatgaacaggaatgagaggagggggagaaggctgagcgcgccaaatatggcgatgaacgtctgccgtcgtgcgggcgagcgagaagagagtgtcagcgatcatcgctcgcttcgggagaggcagctgcaagagctgagagggaggacgtacagtgccgagcggatacctccctgccacctcgcgcgcacggtcgacgaccgagctttctgctccatcccgaatcgcgaggtcgagctcgcgctgctcgtgcttgctgctggcggccgacatgctggctggcttcaagtcgagatcgaagtcagagagggctgctgcgtagaccgccggaccgtcatccccctctgaatacttggaagcatacttgattctataccgcggcgctggttgctgacgaccgacgatggcgacgtccagccagcaacgacccccccttcatcaagcaccacgaccaccatcactcaaggttcgtcccatccacccggctgtgagcaggagcagggagcagaggagtcggacgtccagctcggaggagccactccaacctcgggcggacacgagagcgtgcgcgcgagaggggccgagcgatgggcgtgctcgctctcgtctcgcttgctcaagccgtctcaaggcgtgccgctcctcgaacagcagctgcccgtcatcgacgaacgatgccgccgtcggttgagcggtccctctcgtataggtcgcctcgccggccagcggttctcgttaaatggaaggcggctgggcgagcgagcgagaggaggctcgtgcgcctctcgccgtgccctgcgcgcctgccttggtgctcagccggatgcgggctggaccggccgccccgtcgtcgagcgccctctctttgttctccgagcgctcggctctcctcgtccagctcgctcgctcgtagcatcgctgatctcctcctcctcctgccctccagccaaatccatcagaatgtccgcccagatctcgctcgagacgtccgacaaggagacgttcaaggtcgataaggaggtcgccgagcggtccgtcatgctcaagaacatgctcgagggtgcgcgcgccggtcctttcttcttgtcgtcttcctcttgctcgtcgtcatcgtctttctttctcctccttcttctcctcctcttgctcctcctctatcggctgggcaacgtaaaagagtctcctcttgcactctctcgcaaacgctgatccctccgccctggcttgctcctcccccctgcatgcccgcagacgtcggcgactcccccgacatgtcgatccccctcccgaacgtgaccgccaacgttctgaaaaaggtgctcgagtactgcgagcaccaccgggcggatcccctgccggtgccgaccgacgagaacgccgacgagaaccggcggcgggtgacggagattggcgactgggacgcgaaggtgcgtgcgccgccgcgtgggagggcgtcgggtgcgccgggactgacatgactcgttgggcgcgttcgctttcgcagttcatcgccgtcgaccaggagatgctctttgaggtccgtccctctcattctctttcgtgcgcgctcagacgcccaccaggctcagcagattgacccccctcccttgtccttttccttgtcctcccgctggcagatgtacgccctcgtctttttgctcggcgacggacgctcgcgccgccccagtcgcctgggtcgagcccaatcaaccaacgcagggagctgacctcgcctccccccccctcttctccttcgtgcccgctcgcccagcatcctcgccgctaactacctcgacatcaagcccttgcttgatgtcggctgcaagacggttgcaaacatgatcaagggcaagacgcccgaggagatccggcggctgtcagtccctctcccccgtctttaccctccttgccccctttctcttcctcgcccttcacagacaataccttctcctccgccttgcgccttcctctcgtccctctccccctccttgcgcctctctgtcgtccatcgctgccgcccggggctgctgcttccccttatatccgcctctccgaagacgacgcgctgacctctaatcttcccgttcgacgtccggcaacggcaggttcaacatccagaacgactttacgcccgaggaggaggcgcagatccgcaaggagaacgagtgggcggaggaccggtaaagcttctccctcgctacttccgagaggggcgggtgaggggcgtgcctgccgatctgtcagcaggacgagccagtggtcagccggccggtcggtcggtcgggcgggcgtctgagagggcctcggtcgacctctctctcgcgtttgcaaggcttgcctggcgatgctctcctcctccactgagcctcccctccctcaaaatcctccttcctctggtcctctgcacccccacccacacagacctcccctcgccttttcttcgctccgtttcacgaccaccgacccatcgcgcgcttgccgatgatgccatgccttccgagtcttccgctatctcgctccgtccgttccgacctggaaagagcaggcgggcgggcgaacaataacggcgacgcgaggcgacgcacgattgaggagcccgttcgcgcacgggcgggttcgtccggtcgacacctctcgcttatgtgcgtcgttcagggcctccttcgggctcgacatgcatgcccagacggactccagcagcatgttcatcgcgacaacagcaacgagaaaccagtcctcgcgctcctgtgaacgccaggaggggagcaacgtgactggtgaaggacagagacgatggcaagttaggctgctgcgcagcccaccgtcccttcgacgtcgacctcctgctttcacccaggcctacgcctcgtctgaggaccacgcatcttccacgctgacggctcgacctcccgacgcccctctcggccctcattgcgagagagaaaatagaggagcggtgacacgccctcacgaggcaggtcgcagcccaccgcgcggcccgccagctgctgtcaggttggcgctcgagacatcgacgtccccgcccgaccgacgggcgcgcctccatgttccgaagcgccacgctcggcctgcacgcaaaccggcgagcgctcgtctggcagtctcggtcgtctcgcaggcccctcggcgagccgcgggaccgccgtcgcacaggctcgaggggatcaagctcgcgctcaccgacgactgcgagatcacctcgcttcccgctctgcacgtctgcagtctcgcctggcagcaaggacatctcctacgctatggtagccgactctcccgcccttcgacctcctgttcgagcagtcggcggccggctgacgaaggtgacaggtcggacgagggcgtccacgacggctgaaacggcggcgctcagcccctgactcccccctttgtcgacccttcactcctgtcttcagcccgcctctcttcaagcccacgcgagacttgacaggagggagtctcctctcgtccgatctttctcgtttggccgaggcttgaaaagaggcgagggaggcgacctctcgcctcctcttcttctcttcccatctcggtcttcctttccttcccttgccttccttccctcccttccttcctcgcgctcttcatcaggatgaagttcgccatctctgccacggccctcgccaccctcgccctctccctcattcccggcgccgacgccacctggggctaccaccggccggcctacaaggagaagagcgggacatgccggacgctgttgggccggccgggcttctactacaaggttggcctcagcacgctttgcgtcccggacgcctggcgctgcggggccgatggcgtcgagtgcaacaacaagccctcggtcgactactgtcctgccggcacgagctgtcggtctccttcttgccttcctctctcattcacagcgggcgctgacaccccccacccccctctcgtcgtcctgtagggttcgagcaccggatcggctccgccaactggaagctctgcgtcccgaccagcggcgacaatgaggacgacgacgacgaccccgactgcctcgagggcgccgtttggaaggacggcgtacgtctccctctgctcacgaccttcgtttgccggcgctgaccctcaccttcactccacggtctgcagcgctgccaggtcgagacgaacccgtcgtgcaacccctcgacccacttctggtggtcggccggctcgcgctgcggtcaagcgacctcgaaccgctgcatcccccggacgacgccgtcgaaggaggtgactccgccgcccgagatcccgtcggcgtgctgcccgcccaactggcactttgcgtcgtttgccggcaagaagatctgcgtgccgtcgtcgcccaagctgccttcgtgcaaaggcaagccggcctgcccgagcacgcacggctgggacggctcgcggggtgcgtcctactgctctcctcgctcgtctacgcttgccatcgactgacctttaccttgccttatccatccctcctccaggctgctgcgtcaagcagggccgcaagcgcgaagtctccgcttccggggagctcctcccgcttggcacgcccgacgccgacctctgcccctcgggcctcacctcctgcccaatcgccggcgccgggcctggcgcgttcgagtgcctcgacccccagacggagctcgaatcatgcggtggctgcacggcgatgggccagggcgaggactgcacggctatcgctcgggctgggtcggtcggctgcgaggagggtgtctgcaagggtgagtcggtcgactgggctgctcatccctctcgacctccagagtctgcgctgaccccgctctacccttctccctccagtgtacacctgtgcccagggcctgctgcacaataactcgtgcatcgtctgagcttgcccctctcgtccctctcgtttgcgccactcggacgctctctctttctcttcaggtctcttgctccgttttcccctccgcactcgcttcgctcagcaaacccaatgcaaccgtcccttcatttgaatacatagaagaacctccttccccctccccttcgaccgctgtcgtaatagcttgcccccgtccctccttatctctcccactctccattggttgccggttggctcgcgatgcgcaatgagcccctttctccgtcaattttcttcctctcgtgcacgcacttgctcaaggggtatgagaggaaggaaagcggtcatagatcaaagtcatcgtcgtcggagctgtcaggccgggtgcgcgtgaaaagaaaggcgcaagggcgagaagggagcgagtgcgagggtcagcaaaaaccatcgcgggcagcatggcgtgtttgcacgacacgtcgacaaggccgagaacgtactctctgctcttgcgctggaactgcgagcagagttgcgaggaagatgtgagtacgtgagagcgaggacgtcgctggggacggaaaggggcttgtgagaacgcactgagatcttgccggcgccgcccgtcgagccagagttagcagcctgagcctggcgagcgggatacaacgagcacaaggtcagtgctggtaaggcgattcgagaggcctgcggaggaacgggggaacgtacctgctcgaggaggccgacgagctggtcgtccgacacgcggcctcggagctgaccctgctgggccatgcgcaggagaatctgctggatctgcttggcgacggccggccgggtcatcgagatgcggctcactgaatggaataaaacatcccgtcaacactggagggctcgagctgaaggacaagggggcgagggacgtacatcgctcgcgagcctccggctcgagcaccgatgccatgatggtccgcatctgctcgtcttcggcccgctgcttggcctcctgctcctccctgctctggccctcgccgccgccaggtccgccaccaccaggccctcccggtccgcccataggagggccgcctcgcgaagagccgccaccgccttcgccgcctccgccagaggcctggagctgggccatgcgtcgagcacggatctcgcctgcatgcaaagggacggctatgtcagcttcaagcgagcggagacagggtctctggcagacatcaacttacgcagttcagcgtcgtcgtccatggtttgctaggttgagagagagagagaaggcgggcggtgctgatggttgaagggggcaagcagggccgcttcgtgctttcgccttcgacgcccatcctcgacctcgtctctcgacccgtcctctcgcagcagcggcacgacctctgtaagctcgaagagacgatgctcgcccgagagcaggtcgcagagctgactgacctgtctgctctgactagctctccctctcgagttcttgcagaccgacgtgggcacctctggccagctcgccaccctcctccctcgacgcgtccctcgcgcaaacacgatggccgacaagccaaggcgagccgtctccccttctgctgccctcatgcctggctctacagctcctcccccgctcggcgagcagacagaaatgcttcacgtggcaccaatgaccgaggtcgaggcaacgccggcacgaggccaccgggccgcctcggaggataccgacggccacaactgcatcatctgccttcaaacgatcgttgaccggacggtcatcgtgcgtggacttagatggcgtcggcttgtgcctgttggtctgctgacctgctgtcctcatcggctggcaggtgacctgcggccatgaccagcactgcttcccttgccttaccgtctggtcaggtgcggaccctcgaaccgccgctgcatcgaaggggacgctcatagctgacgagccgtctgtcgccgttgccgcctcagatcaatcgcgcaagtgtccgctctgttcgcgtccgatgggcgactacctgctgcacgacctcgagtcgcagccgccctttgtcaaggtgcgtgtgcgactggcgacgcttgtctagcgccgacctgaccccttgcttctgctactgctgctccagtacttcctgccgccgtttgtcaagccgtcgacggctcaccctcagcacccggcgctgcctccggcgagacggcgcaactacccgctgcctaggcggacggagcgggcgagcagcgaagagggcgactttgagcgcaggctcgaacgccggcgcgaaatctaccgccacggcctgtacgccaaggtgcgcgctttcctcttacaggcccgctgtgatcggccctgctgatccgttctttgcctcgtgtctggcagcacatggcgagcaatccgacgacgcgctacaagccggctccgacgccggttcagttcgcgacgaaccctgacttggttgcgcgcgcccaaatctttctccggcgcgagtttctcgtctggaccgggatcgacaccgagttcatggtgacgtacgttgtcggcctgatggagagcatcgacatccggagcgacgccgccgtccggctcctccgcgactttctcgacgtcggcgccgaggagccggccgagggcggagggcgggcagaacactttgcccacggtccgtccggctttcctcccctcagatctgcacgttgactgatcccgcccctgcatcgccccattagaggtctactcattccttcgctcgcccttccgcgacctcaagctctacgacgccgccgtccaatacgaccctgtgccgtcatcgtcccgccggccagctttgccttcaccgtctcagccagcccgtccaagccgagatgcgcgcgcctcgcccgcccggcttgcatcagcctttgatcacctcgtcgacgatggccgcggtgggctcggcgaggcgctcggcggctcgcacgggcgtatcgtccgggctggagccgatgacggcgacgcctcggcgagcgagagcgaccgcgagggctctgtccgaggtcgcggtcgaagtcgaagccggagtcggagccgcagcgtcagccggagcaggagtaggagtttcggcagccgggcgagcttccggagcccgggtcgaagccgccatgcgagggcgtactcggtgcgtgttcatcgctttgccatcctgcggcaggccatagctgacctcgagagccttcattcgacgaccgtccgacagcgtggccgctacagcccagaccgctcgcattcgccgagtccccctcgtcgacgcggcggctcgtaccgctcgcgctcgccgctctcacctcgcccgcgctactgcgacccgcggcagagtccgcgtcgctacgatcggtacgacgctcgcccccgcgacgactaccggcgattcgatcggagggacgaatggcgtcgggaggacccacgcgagcagttgccgcggagcggccgggaggccttgcccgaccaaggtgccgtctttgaccagcgtgggccgagacgctttggtgggccgggcggtggtggaccgctcagcgaccggcgcggcggaggacctcaccgctcgcagccctacggcgcccccccaccactactgcagcaagcgcctgccggccgcgagctgatggaggacgatccgctcggcgagggcatgcgggcctggtctgctgcagacgccgctgcgacgcccgtcatcgcactcgacccggccgacccgacgcctcaagaggcagacgcgcacgccgcctcgagccgcctcaccggccgtaccgccggcctcaactcgcgagcggccggtgcgaatggacgagcaccgccgacgggccctcgcgccggtcggagagcgacgacaacggctgctgctgcgggaggcgcctttggcattcgcggcgccgctcgtcagcagcaagccgcgccgaccgcgccttgtccggcaacgacgaccgacggcaagcctgcgccggtcaaggctcgaggcgcgccgagaaacgtccttcttcagcgcctggccgaagcgaaagcggacgctctgcgcgtctcggccctcaaggctgcccgtgtagtagcgacggcagccgaggaggagccagcacctgcatccgtacctgccgccgcgccggtcgacgacgtccggacgggcatcagcgtcacgccgctgaagcgagcgcccaaaaagcccgacgtctctggcctcaagagccggattctcgagcgtctgcaggccgagcggcgggacaacatcaatggcgaccgcttggccccgacagtcgacgagagcgaggagcaggcgctacggcgcaaacttcttgagcgtcgcaaggcgaggtgacccccctgccgattgatggcgaactaggcaaccccatgcagcccccgctcgggtcagtcgttcgggccgctgaccgccgaaccacgagggcgttttcccgggtccctgggaggggggactgacggcggcgaccactttcgacgctcttctttcggacacgcccggaagtcagcgctcgttcggcagggagactggccagggcttgatgggcaggacagagcaagggccgttgatgctggagtggcttcccgactcaccctcccagtcttccgacccactgaccttcgctggaccttcgacgccgatacctgatcaactcgacagccgtcatgtcgcccgcctgttagctttcccagtccccctcgctcccggttcctctcaacgtgtgacgtgcacaagactcccgggcctgtcgctgccgagccagctctcctgccgagccttctgagacttttgcccgggtgcctcgtcgcccttccccttgattttcccggtccttcccaccctttgcccctggccgccgcaatgctgcgcgagagataggtcggccgcagccccgctcaacgtcccctcccggtcctctcgacaatcttcccgggtgcccctctcgcccaacgactcgcccacctgcggtcatccgcccgggccggacgaggacgctcttccatagcttggccagactctgaaatagcatccggccgagcctgctgctggcacgagccaatcacccggtcgacagttggcaagcaggcaagcatgtggagaaggagtcgggcaaagactcatgacgacgagagagagaggccgagccgaccaagcaacctgacgcttccttcttgacgtcctgacgacgggccaaccagacggagacttgccgcccaaacctctgacgtcggcgagaaaaattgaggtggtggtggtggcggcggggcacgaagggggagccggacgcccagcctttgctcttgctcgcagccgacggtggtggctcgcctcttgccttgcaagctgctgccgttcttgctggctgcaccggcgttgcggctcgcagaaagctgccccggatttggccggccttggcgacgacgacaggactcgacggttgtttaatttcagaccggccggtggggctcggccggagaggcggtaggccgccgacgacgcgatgacgctcgctcggctcggctcggccgcctgcagtagccgacctggtaaagcggctgctgctccgtcggagggagggacgagggctgaacgacaggtcggttcggagagaggcatgcttccgccgacgccaagcagcgatagaggagacccacgaggacagacaggtcggccccagacatagctcgacgcaggcaggcaggtcagaaggggcaagggggaccgggccagcaaggggcaaaaagggacgaagggcctcgctgcggggccagccgccccaccgctagctcgctccctcccttcctctcccggaacgggggccacaaaactcccggtccgctcgtgtgcccttcgcctgctggtgctctcgtgcgtcgggcgggcggctcggcggcggcgaagggcggaggctcctccccccacccccccacgcatgatgcctttatcacgacggtcttcagatcggtctctgtcgggcttaacctcggcgggggccaccaaaccagacgaaaccgcccgcaccaaataaaattcgggcaacacccttctgattccaccccatcgtccctttctcctcatttaccgtagtcacgcacgagacgaggatcaggcgctgacgtcttgcttcctcgtctttgcagccccttctttctctatctgctccgctcttgttgtcgatgcatgtgccgtccaatcttcttgactgcgtccctctgagaaagcctgtcagctggtcctgtgtgcacttttgaggattgttcagaagttgtcatgcactcgtgtgcgtcgtcgcgaagctctcgccgtcgcgctgcaaacggcacgaggcgaagtccgaccgacggttcagagctcagccgcctacgccctccaacagcatcttcttctgcacccttgcctcccagcctcaaccccccttttcagccttccttctctcttgagccagcctccttcttcgctagcatggctgcacccgcattcgaccgccggcgagtcaacgggcccgaggtctcgttccccccagtctacgacgacgagctgccgaccgcagcgagctcgagcaagaccgccgctgcgttcgacagccttgccgacgccgcccggcgctatcagcggacgacgcgagcaaaggatgacctgcggcccatctgtgagcttacatctcctgcagacagcgaccagagcgcccctcgagtgagcgagcgagcgagctgcggctgactctcggctcgaacgtcggcgccaccccttccttgcagtcctcaagacgggcctgatcaaccaggccaacggctcggcctacatcgagatggagaacaccaagattgcctgtgccatgttcgtctctcgattctgtacattttgagaaggcccggactgacaagctcttcgacccaccagctacggtccacgaccgaggccgccgccgtacgccgccgaaggcacgctcaacgtcgaggtcaagtatgcgccgttcgcctcggacccgcgcaggttcccgctcagggtgcgtgcagtcatcctctcctgcctctgccaggcacgtcgcagctgatctcgcctcgctttgccccgacaggacacggagccgccgttgccggcgtcgctgctcgcccagtcgctcattccggcgctccgactccacctgctgcccaagtcgcagctcgatgtcttcttgctcgtcctcgagtcggacggcgtcgagggtgtcgtcgcagccgggacgactgtcgctggcgcagcgctcgccggtgtcggaggcggtgtcgagatgatgggcctcgtcgtcggcgttggatcggtgagtggccgacgtaatgtcgacctctcgttcgcacacgttgacccagcatcttgctcgctcatccctccaggccaagattgacggcaagctgtatctcgacccgacggtacgcgagtcgcagctggcgacgtcgcggctgacgatcgcctgcttgccctcgctcggcgtcgtcaccaacgtgtggtcgacaggccaggcgccggtcgaagcggtcatgaatgtccgtccttcacaaatctgtctacctctgaccgtgctgattgatccgctcctccgtctcgcaggacatggagacgctcatggagcgcgcaaaggacgtccacgctgtggtcgcgcgggccgtcatcgaaggcgtcgaggagcgcgaggcaaaggacgcgcgagaggccaaggcgctcagcggaggggcgtgacgaggatgaagctctctgagctctcgagactaaggcatgagcgattggatcaggaggaaaatgactaccccacccgcgcacatcgctcaggtcccgactagcaacgacgccgcctcaggtctcccaccgccggaactcggcgtcgaggctgcaataggagggtcgcaataggaagtcagccgagcgcacttcatgacaggcggcggcatcgtgggccagacgcacttccgtccgctctcgagaagctggctcagctcgctccactggctcgtcacccagcggagcttcttcgagagccactcgacgacgcggtccgggtcgttcttgctgggtagcgacgaaatcttgtgcgagccgccgtcgatgcggacggttgccgtgctgggccgctcgtcctcctcgtctggcagctgctcgatggtgtcgctgaaagagggagaggctccagtcaacgtcgaacgaggttcggtttccaacaaaagagacgcaccagagccactcgtggatgtcgtcctctgatgacgtcgagcaaaggaagcgcgagaggtcagcagctgtcgcaggaaatcaataccgggttcaacgccccccaatgggtcatgttgtggtagacgcgggcgcgctggaagcagtttcggccacagttaaactgtagcagaacgtctgacttgtcagctgcagtggcttccctgaaagcatgttggctccaagcgcacctcagagtccaggcccttcagaccctcgtcctcggactcctccgagtcgtaggcgatgcgctcgaaagtgtctggatcgaagcgcttgccggaaagctcgatcttccgggtcgccggccggctcgagatccggcactgcggcggggccaactagaggatcagccatgacggatcgggctcacacagctggagagacgaacagcatcgcacgggggcgagtcgcccttgattgtgaagccctcaaagaccgggaagcgatcgagggccttcttgaagtgcgagggccagacttggctcgtcacgccgctagatgggggcagacacgagaagggtcagcacgagagccgcagagcgctcctggacggagagacccacgagtttcgggtgctgatgacatggtctcgtaggcgcttgaggggcgcctggaagtaagggtcttttgtggccttcttggcccactgccggcccttgacgatcgcgtggacctttggggtagtgcgggctccggtcagcacggcagcagatcaggaccaactagagcatgtctgcagggtgaactcacgtgccactggacgacgacgttgaagttgagctccatcggctgcgacgcatcggtccggaaggcggctgagtgagtgaggatggagcaaggtcagcgtgtgccggccgtgacgaacacgacgcgccggcttacagggcaggtcgagctggtcaatctcctcgtcatcctcctcgatgaactccttctcaaactcggagtcgtcctcggtcgcgtagcggcctctagcgtcccggccccagatctcggtgtaggcctcctcttcctcgttctcttcgtcctcgtcctcgtcctcggtgaggagcgaggtcacgcccgacccacgctgctgcttgcgctctgtgcgacggacaacgcgcgagtcagcagcagctcaagcacgagcctcgcctagggttgagcacgacgcacttttgagcttttcgagcaacgctcgccgggcgagctccttggtcccagcccgctcggtgccggtccgcatgcggttgtggagggtgactgtgcagcaatggcgtcagcgacttcccggcgcaaacgcttgacgtttgaccaaatagtccactcacgaaggcgcccgcggtcgtcttcgagatcgtctggttccgagtcggtcccaaactcgtcctccgagttgacgaccgccttgcgccgcctgagcttcttctgcttcttgagcttgcggcgccgacgctccttgtcctcgtcttcgtcagtctcttcgtcctcggacgagtcgagcggccgtttgcgtggcttgggcgcctcagtcgcctgcgtcttcttctgtgtcgcgcaagccgtcttccaccgatcctcctcctccgagctgctgctctccgtagcctcgtactcatcctccttcgcggacttcctgacgaccggtctcttgaccggtgtcgggcgcttagctggcgctgggcgcttggcaggtgttgggcgtttgaccggcgtagggcgcgcaaccggcgaggggcgcttggtgggcggaggccgtgccttcttggtagagggcgatggggccaccttcttcgtcgggcgcgacgccggtggcggactgtcgggcggaggcgtgtccatgatgagcaggctgtcgtccgagttgccgagaacgtcgtcgtccgacgcaggccggacggcgaccggcttttgttgggctcctttactgatctggctaccgacggcggcatccagaaggtcttcgaccgacgtctgcacagcagccggcggcgcagctgtagccgaacgaagcggctcgagccctccgtccgagtcgtcagagccgacctcgaccttgggcttagtcgatggtccggtcgcccggcccttgccctttgaccgagcgggcggggggctgccatccgagacgagccagtcgtcgtcgacgacacccgccgcgacttggttggcaacatcctcgtcttcgtcgtccgtccacttgcccgagcgggtcagcggccgagagttgtccttctctttgccgaccgccttgcccttcttgccctcccactgcgcgcgggccgccgtcttggccgggggagccgccgctagcttcgaggtcgaagccgttcgcgagagctttcgtgctgaggcatgcgcctgagacgagcttgcttcggagcggcggacgagcttgcgggctgaacgggatcccgagggctcgtcgccggcttcggacgacgaggacgaggtgatgtagcgcggcggcgagtcgacgaggtcgagcagctctgtcggcggagggtgtgcgggagccggtcaggagctagcacgagcgaatagagctgccatccgcaggctgccgagccagcaaggcccaaggatgaacgcacgagacttgcgctcgagcgcgaagtgggccgggtcgtcctcactcgacgaggactcgctgaagacgggctcggcctcctcgagcttgcggttgacgcgggtcgtccgcttccgctgcggagagaagaaggccgcgaccgtcttctgtgtgagcttgaccatcgtgaatcacgtcggagcagccagctgggaaggcagagaggaggagggctacgagcgatgctggtcaagggcaatgtctgaccggagtcagacgcgcagccgctgcggagacgacgcgacggcggcaacgacccagcgcaaggcctgtgcagcggcagcggcaggtccacacgggtcgtcgccgacaagaggcaggcgcattcagaagcaggggtatcgccatctcatcgctcgccctccactaagcagtccgagcttcaaactcagccgtaccggacgtcgcgcttcgtcccggagaaccagtcgtcctgcacacgcgatacctcttccggcgcagtgttgatgatgatcgacctgagttagcgacgagtgctcgaataggtcagccaggcacaaacggaaggtggggatgcgctcacttcgtctggctgtacgctcggtaagcctccagcccgttctcccgaccgatccccgagtccttcatcccgccccactgcagggcagaagaggcgtcagcatcggccgctgcattgcggacgcccaattctcaagacggaacactcactggagacgagggatcgttacgatggtgcgagttgacccagacgagaccgctgtcgagagcgttggcgacacggatgcccctcgctccgtttttggtccaaaccgcggctgccgagcggaaccggagtagagcttcaggtcaacgttgcctgactcaggccctgacaagacgtaccgccgagtccaaagtcgcagtcgttggctagttgtaccgcctctgcctcgtcctgtgagcgaagtaaaggtgtcagcgaggcgcctgaggtcgcgaccagccacagaacgacgacgcaccacgaacgaggtgacgcatatgactggaccaaagacctcctccctccagactcggctcttgagcacgccaggaccgcccaagattgtcggcgggaagaagtagccggcgctcaggtcaaagccgtcgagagggctggcgccggccattcgcgcgcccccactgagcactgacagtccgtcgacctcagtcgaaagcttgacaatttcgattgacttggcgagctgggcgccagagatgagagggcccatcatcgaagcaggattgagagctggaagtgagtgattgtgacgatcagctcaagtgaccgacaaccgctagctggcagaacgaccacgtacggtcgccgatacggcgctcgatgctggccaccttctctgtgagctgccagggttacgcaggaaagccaagtcaggatcacatcggcgagcacttcgggaattgagactcacacgctgcatgaagtctgcataaagcgtctgatggataataacgcgcgtgccagagacgcatctgaagcgtccgaggtcagtcacagattcgcaacagagcgagcgtcgctggacccgacgtacgtctgtcccgaggcgatgaacgaggcaaaggcgacgccattgactgcgttctcgacgtctgcgtcgtcgaagacaataatcggcgcctgagcgcggacatttttcgtcagcaaggtagcgcacctctcaacgaccggccggtcagcacagactcacctttccgccgagctcggccgtgaaggaggcgagtcctcttccggcaatctctccgatcttgcgacccgtctcggctgtcaaggaaggtcgactcgtcagcggaggttcgctcgcgcgagcagaggcaaagcccagacgcactgccgccctgtcagaccatcagagatcgtgtcagtcaaggaaaaacggcgatttcaaagctagactgacagtcaggtcaatcttcttgatgcggcggtcctcgatgagctcctttccgactgtgcgaccgtcgccgggaagaatgcacagagcaccatcgggcacgcccgcctctgtcgcaagcaaaccgaactcgagtagcgtgagcggcgtcagcctgaggtagaacggccgttaatgtcagtgtgcaagataagcgattgcgtcggcaaagctccgacgcactcggagggcttgcaaatgaccgaattgcccgccgcctgttaacgaaggggagcccatcagcaggtgatccacgccgagtgaagcgggcaagacggaccagggcaggagctatcttcttgacggcaatgaggagcgggtgattgaagggcgcaatctgcgttgttcagcggtcgacggtcagcgcctgccagcagatcgacgacgttcgagagcagactgcgctcgcacctgagcgacgacgccgagcggcacgcgcttcacaacgttaaggatctcgccctcggtcggcatgacggaaccttcggtcgtgcgaagaacggccgcaaagtaagccagccagtcgggcaagcgaccgagctgagccttcagctctcgcaccgcccggccggtctggagcgactcgagctcggccaacgccgggaccttctgcgcaagcagctccccgagccgggccaggatgcgcgaccgatgtagcgccgaagagcgtgaccagatgccgctgtcaaatgtgtgctgggcgagatcgagcgtctgcgagatctgagtcgacgacgacgtgccgacagaggtaatgatagcggtggttgacggcgattcgacgagcagcctgcgcggaggcaaggaggcatgtctgagccaaggaggtcgtgcagacggactgcccttgcgacttactcggtgccctctcccttcatgaagcttccgccaccgaggtagggtccgtagtcgttgcgctatcggaaagggggggggggggggttggaggacggagggtgctatcagcccgggaccatgctttataggtcagttgcttcgagaaagaacactcacaaggacgacacgagcctccgacaacctgcgagcggcctgaaagagacgaggcggtgaccgaagcatcctgctgggcggccgaggtcgacgttggaggctcggcgagatagcggcatctcttgaggcgtggccggctgcgcgccgggtcattgtcctgcaggaggccgaacgatcggcaagccttgctcttctcgacccatcactctcgtctgcctctcgctaccgtcttcgcaggacggcaagcaggtcctggccgcagacgaacactgttcatctcactgtgcgactcccttgcctgcctgcaccattatcgagtccttccgctcacccggccgagctcccctctgacccagatcaaggatggcccgcagcgcctactacgctgtcgcccgcggctaccacccgggcatctacgcgacctgggacgagtgccagaaggaggtcctcggctacccggcagcgagctttaagaagtttgacaacgtcctcgaggccgagcgctttgctggcgtcaagtcgtgtgcgtcccggcgcccttcgcactcccgccatcctcggcgagcgctgaccgacagctcctctcatcgcttatcaatttcagacctccctccgccgggccggtcgggtggcggccagcaacagacaggtcgtggtgcggcttttaaggccagcgggtccgcgaacgctgcagcaggaccgtcccacggccggggcgagaagcccggcgccaagtctaacgctctcctcccgacgaccgaggatgccgacggcttcatgcggacagccgaaggccggctcgtcgtctacacggacggaggctgcaccagcaacgggaagaaggacgccaaggccggccttggcgtctactacggtgctcggagtggccgcaacctctcagagccgatcccggggccgctgcagacgaacaaccggggcgagctgctagtctgtcctaccgctcggcaaagagagcgtctgctgcgatactgactctctctctctacctccctgtcaggctatcctgcgggcgctcgagactgcgccggagccgaaaggcccactcgagatccggaccgactcgcgcgtgagtcgccctccaacctgcgtctcaagctgaggtttatcccgctgaacgacgtgcgtcttccagtactgcatcgactgcatgacaaactggctacccaattggcggcgccgcaacttcaagggctccaacggccaggacgttgtcaacctcgacctgatccttcatatcgaacgcctgctcattgcccgcgcggtcggcgcgccttcgctcgacgagattgccctccgggacgtcactcgcgagctcgagatcggcgacgtccggctgctctgggttaagggccaccttggcgaagacggcaacacgatggccgaccggctcgcgaccgccggatgcgcgcgcccgaccccggcgaagggcgccatctacggcgctgaagagcagatgtacctgcacgtcctgcgatcgtcggccggacgggccaagccgcttgagagcacgatgctcgcggcgacgacctcgtctgccaagacaacgtcgagctacttcaaggcgccgccttcctcgtcctcgttggcgtttcctgcgtcgtcggcgcccggcgaggccggaccggccaaacgcaagcgtgccaacaagcacgagagctcgcactctgaggccgacgacgtctttgtcctgagcgacgctgagtcggacgagatccagatcatcgaggcgccggtaagtggcacttcttcgtcaaagcacgaactaccgaccgctgacttttccttcgcgcgttgctcgcagagctccaagaagacccggacggacgccgagaccgactttgacgaccttgatgcctcgtggctactcgcggtcggcctcgacaagttcgagcccaagccttaaaccagccacaggcacacctcacagtcgccagcccccctcctacctcctcctacctcctcctacctcctcctacctcctcctacctcctcctacctcctcctacgactcctacgactcctctatttccccctaacttattcacaatgataatttcatgccctcctcactctctggtccgtgacgctcatctatagagggctcgagtcagagctcgtcgcgcttgcgcccaccgcgggctctagcaaaggcctcctcgaggtctgtgaatcaaacgcaggaaccatcgtcagtgatcagagcccaagaagaaacaacgcgcgcacgcttcctgaatgcacctttgcgcagcgcatgtgttatcgacgacggcaggacgacgtcgtattgcacaaagagatcgcccgcgggcgagtcgccgtacgcgggcatgccctcgccagagatctggtgaacgtgccccggctgggtgacgcccggccgcgagagatcgacctggtggccgtcaaagtgcggaagtgacgcgttgaggccgaggagggcctgtgtgagagcacagaggggtcagcaggcaaggacgcacgaccactgtagttcagctcgacgacgcacatcctcgattccgatcgtcttgcgccagacgagcgcctggcccttgcgcccccagctgccgaggccctcggtccggcggctgcgcgttcggacgataatgtccccggcctcccactctgggctctcgtctgcgtcaccgtcaaagacgatctcgaacccttccggcgccccggccgggaggtggtaggagagcttgattcgggaaggcaggatcttttgcgcagcgcaatgcgggcagggtctgtgagagcaaggtagggtctacgtcagtcagctgaagtcaatcggagagcggctgtccttgtgggacgcaccgccggatctgagtgccctttccgctgcactcgttacacgtcacctgcatctgggtatacctgtcgaggtggagagagccagcacgctccggtcagccctcgtataacaactgggggcggccagcagacgtacatgccggggaagacctgttgcctctgcatcttaacgccgtggcctgagcagccgccgcacttgacgatgtcgccgtccgaagctgcgccagagcctcggcagtgatcgcagaggatcatcttgtcgagctcgaactgaggacggccagactccggtcagcgaccagcggaagggaagctggtcccgaccaacgcaggacgaacttcaacctcccggccgttgtaaaagtcggccaggtcgacctcgatctcggtcagcttcgatggtcctcgccgctcttcctggcctcctgcggaccagtgggccgagcgggtcagcctcctgtcttctgacgagtccctcccgacgacaggcgacggacctccgccgccaaagaagcgcgaaaagacgtcgcgcgggtcgtgtccgccattgttctgccgctgcttgaggccgtcctcgccgtagtggtcgtagatctggcgcttctgttcaggcgggatgggtcgcaaagcggcgtgcagaggtcagcggcaagtagctagagcaatggagatcaaaacgcacttccgagtccatcaagacctcgtatgctgatgacagcggacagagaggacagtgagcatggtcagttcgacagcggtcagagggctgggccgagtgctcgtggcgtggacggcaggcgacgacgacgcaccggccgaggcgtcggcaaacttctgctgggcggccgggtccttgttcttgtctggatggttggcctttgcaatcttccggtaggccttcttgatcgtcgcatcattcgcctgccggtcgactgtcgagacgaagggagggtcagccctcggttcggaggaccggcaggagctcggcgcgtggtcgccaggcgacgcgagacggacctccgagctccttgtagaaatcctttgcggcgaggacgaccgtcgcaagcagcagcagatggagcagccggcagaggagcgtcgacaacatcgggcaaggagtggacgtcgagttgagcgtgggcgtgcaggtcgtcgggacgccagctcatcgagctgcctgcccatcttcctgggcgacgcgcccgagcctggcaagccgacgcgcgcgcgaggctcgcccgcccggcaggcaggcagcgagcgagggcagcgacctcacctcctcaaccccgtcacctcctctcgtccctctctcttccttacggcacgccctctcgcagacctcgttcgctataccggccgaacgccaaaaagcagccagcctctcctcgctcgcacgcaccctttcccgccatgtctgccatggacgtcgatgccgaggcctccacctctgcgccggtcgagacttcagccgccgctgcccctgccgagggcgccgccgacgagtccgctgccgtgaagaagcccgtcaagaagggaccggtcaagaagggcgggaaggacgccaagggcaacggcaagaagtttgaggttaagaaggtcagtcgctgcggcaggcggcggcggagccgctcgttgcgctgcgtgctcgactcgtcaacgatcgctgaatgtcgctcgagtctgtctcttccgctcgaccttgcagtggtcggccgtctcgatctgggcgtgggatatcctcgtcgacaactgcgcgatctgcaagaaccagatcatggagctctgtgcgttcgggcctcttcgcccttccatctctgccgaatgctcagtcctccgtcggtcgatgctgctgctgctgctgttgctgacgactgctcggtcccgatggtttgtcgcaggcatcgagtgccaggccaatcaggcctcggctaacacggaggagtgcacggtcgcctggggtgtctgcaatgtccgtccgacgtcccttggagccctgctccgcctcctctggcagagtgcgcctgtgctgaccgagcccatgacggtcgcgcctcggcttccagcacgccttccacttccactgcatctcgcgctggctcaagacacggcagggtgcgttttgcttgttgcttgcgcaaatgcgcccgtcgctgatcaggccccccttggatgcaccggtcgcggcgttcagtctgcccgttggacaaccgcgaatgggagctgcaaaagtcggtccttccttctcggtcatctgtcttggcgctgacctccggttgttcatcactcgcaggtacggccgatgagcgcgctcacgtcggcccgccgcttcgactatgcctctcgcccgatattcccactcgctctcgagtcgcggatgctcgccctcaatccacgccctcgttcacccgtcctccacgcatgtctcgatgatccctttacgactacgatttggcggcgggtgggaggagcgcgaggctgactgctcattgatcagccggcttctcgacggcggcctgtcgccagacgtcgatcggcttcagcagcccaaggcatcgcgcctcggcgtcctcgaccgaagcctgccaccgctcgcgctggccagcctcccactcgcggatcgcctgcaggaccggcccttgcgtgtcggctcgggggtgcgagattggatacgaccggtcagacgtctcggcgaggccgtcgaataccttggagagcgaccgggagagaaggacgccgtcgaggatcgagtgcgaggccgactcgccagcaactgtcgcagcgcagagaagagaggtcagtctgggcggccccgaccgtgccagcagagagggggtggacagacgaatgggcgagccatgagcggcgtctccgatgacgatcacgcggtcggcgcctgggacagtgctcgactcagtcggcaaagcgacggtccgcatgagccagttgcgcacgccgttcagctggcccttcttgagactgcggacgagtacctgcatgtctgcggccgtcttgtcggcgagtgcgtccagctcggcgtaaagctcgtccgggaccgtgtcagcctcgccgagcgcgcgtttcggccgccagagcgggtcggcctcgccctcgggccggggcgagcggtagtacatgaactggtaagcgacctctgcgtcgttggcctgcgagaacgtctggcaaaagacggcgttgtcggcgacgtctacccggtagacgtcggcgtcattccggtgagcgtacggcgtcgggttgactttgggatcgagcgcgagcgcgatccgggcgttgttcgtccaccggccggtgtaagcaacgacaggtaagaccttgggccggcaggccggatgcagctgggcgcggactggcgggcagtggcgggcagcaggagggtcagcggagcgtcgtgaggcaaccaagggtagaggagctggacgcaccagccgaatggacgccgtcaccgccaatgatggcacagccgacagcctccgtcccgtcggcaaagacgacgcggacggcttccctgccgtccgggtcacaaacgagctcccaccgctcaaacttcttgccatgctcgacggcgagcttgttgccggcaataacggcaccaagccgggctcggttgacgtgggcggtccgacctttgggcaggtcgagcggcgcgaggacggcgcccgtctcgaggtcgaaggcgttcgactcgatgcgaccgcgaccgccgagcggatagtcgaccgtcgcgccgtcgatcaagcccggcgacttgagcgccttctcgagcggcgccgacgcgtactggtgcaggttgagcgagtaatgcgggtgagaggtcgcctggaactgctcgaacaggcggagatgcgagggcgagcccttgccggcctcagtcagggcgcgggccagcgtgaggttggcgaggccactaccgatgaggagcagcgggagctcggtaggcagagccgagacgagtctggcggcggacgatgaggaggccatgctgagatgggatgatgggaggcagggtgagcaggcgggccaggtgagcaagcagggtcgtcgaaatgccatggcaacgccacgcgccggcgcgggcgcagcgcgaaaagggagaccgaaacgtgtattcgtgtagcaggcgaatacaggcgccggacttttctgcctcgtgaatagaatagctttggagggcaaacggacgtggaccgcccatcaaaatcggcttagaattacggcgcgcgcgcaaccgccacgacgtaccctcttgcacaacctcgcaggacacgttgtggccacgcacacacgagtttgtagggcttctatagggcgccgcgctgttagcatcaagaccgtatgcgaaattgctcaagccccatgtcgaacaggccgcactagaggtcatcttctcgggtcaggctgaagaggcgtcgtcgaacccaacggcgtcgtcctcgttggctcgagcggccgacgcgccggccacgtcctcatccaccggtctgccctactcggccacgtcctcatccaccggcctgccctactcgcgattcgaagtcgacgatccggatcaacgaacgccgctgacagaccgaggctcgacgcctgcatctcccggtcaatctggaggccgtcggtctgccgggctgagaataccgcgaggcttgcgcggaggtgcgtcctcgccgacgtgctgcgcagctagccaactctaggggagctgaccaagtcgttgtcggccgctctggcagtcacccgtgtcgggctcggactcggctggacgctctactcgatcatcctctggcctgttcaagtgatttttgggctcgtcatcagcggctggtcctggttctgtgcgtccctcagcttggtagtcctcgacgccacacgcggtctgactcggcgacgcctacccttcgcagaccgcctcataccgcagtcggttgcgacgttgctgccggccttcttgagaccacctccggcatcgatcgatgcgtccggtgcctctaggcgacgcgagcctgcggccttgcgcttcttgcgctccctcgaggcgctcaccaacgctcgctcgacctcctcggtcggcgcgagggatccgcccgagtcggatggcgctcctgcaagcttcgacgaggagcagagcgacgagcaagaggagctcgaactgcccgagttccatacgggcggctacaaggaggcactcgagcaggccaagcgccagggccggatcgtcctcatcggcctcttttctgacatccaccaggacgacgcgcagtggaagcggacggtcctgaccgacccactcctgatcaatgcgctccgcaagcacaacgtcctcctttgggcgggcgacgtcaaggaccgggagccgtaccaggtgacgcgcctgctcccgccgacaacatttccgtccctcacattcatctcgctcctcccgtcgtcgcgcggcagcggctcgtcgccgtcgtctggcgccatgaagctctcggtcctctcgcggcacgaggggccgacggtgacggcggccgaacttacgacgcacctcgagcagtcgatcgtcccccggacgacggcgatcctcaaccggatccagggcgagacccgccagcgcgacgaggagcgtcgactccggcaggagcaggaccgggcgtttgaagcctcgcagatgcgagacgtcacgcggattctcaaactccgcgaggagcgcgcccagcaggaggctctcaagcgattcgaggccgagcgcaaacgcgaacttgagtgcgagaagcagtctgccgaggccctggcgagggtccggctggcctacctccgcttcgcccgctcgtcgctgctgcccgccgagcccgcactcgacgactcgtcggcctcgtcgatcgcccttcgcctcccgccaacgcctcggcccttcaagcgacgcttcccggcctcgaccccgctcgaggtgctttacctctgggccgatacgctgacgatcccggccgacttgccagtggcgggtgacccatccgagccgccaaccgatgccgacctcgacggtcggccctaccgccacgagttcgccttcaagctggcgacgagctatccgaggaaggtcctcgacacgtccgacggcgacggcacgatcggcggcagcgcagttctcaaggccggcgccggagtgctcgtctttgaggccgccgagccttcggggtcgcacgcggccgacgacgacgacagttcggatgatgaagacgacgacgacaacgacgagcaggtctagcgccatcccctgatttattgcgttctctttgccgggggcagccatgtgatcgcggccagggaggagattacagcggcgagggagacagcggcggggaagaaggagcgggggtcggagcggcaaagcgactgatacagagaggcggccgactcgtcacgagagattcgtggggagcaggcacccggaggggtactggcagtagaggcataagagcgagaagagctgaaagagtgagatctaagtggggggcgggaggaaggcgctgcgccttactcgtcggtcgggagcggaggccgcgagttcttgcgttttggcacgaagatcgaaccggcgcgcgaagcccgctcgcgtaagcttagcagggtgccgctccgcggtcgtctccgaggaccggacccctcgccagcctcgtcctgcagctgctgcgcgcgtgtcttgtattgaccagtcaggttggtttggctctgcctgctccgggtcttgccaaggacaccgccgccctcctcggcactgaaatcgaagccgcggtgggagccgagtggcgtccgtcggccggtcgacatgtctggagcaaaggcgcggcgactcgagcgtcagttagagaggaggcgccagctcaaggaaaagaaggacgcaccgatatggctaccggccgtctcgattcgccgcatcgaggtcatcgaaatgcgcggctcgtgcatggacggccgctgctcgtgcatcgacgggcgaccggcattggcgactgggggctcctccttgggatgcttggccgggacggcgtcggggatgctctcgttcgcgaacatgccgcccagcaacgggtgcgagcggatgtcgatcagcgggttgtatttcctggcgaggcggggaaggggagcgcgcgggcgtcagcacgggtcgcggggcttcgacggtgaatcgctggagggccacgcaccggatgacgcgcataacctcgatgtcggacgggtggtagagctgcatgatgcactgaagcagatacctcggcaggagggcgacaaagcagacaaagatgacgccgaaccagaagagcggcgaccggaagatgaagtagttgaggccgctgcagacggagggtagtggtcagctctctggatcgtgctgaagagacctgcaggcggccgacgtacaagacaaaggtggcgatcgtgttgggcgggagggcggtccagacggcggtgaaagcccagacgaggaaagggccgatgcagacggccgcgaagacccaagcagtccaggccgacgtagtgatgccatggaactcgttgcagaccattacggcgccgatgaccatgacggtcgagaactcgtacatctggacgtcaaagccgtcggaacgcgccgtcgtggtgtcgtacgcctggttgataaagaagaaaacaacggcagactggcaaagggcgagctcgtcagctaaagggcaggaacggatccggtcgatcgaagtgacgagcgcacctgaaggacgccctcaaagacgaagtagcagtactgcttgaagccaaaatacttgccgagccggccctgcttgtaaagctcgggcagtgccatcaggatgtcgtcgtcgacatcacggtcaaagagaccactgtaggcgggacgggggtcatagggtcagcggcgggacggagcggccgagcagtgagaaattcgagccgtacatggcgatgacaggagctgaaggtggaaagcacggcaggtcagttcggtgttccctatcgcacgaggccaatgcaagggaaggacggaccaatcgtccagacgacgttccagagcagcaggtagacgtagtcaaagacgctgagaagtcggctcgtcagcgagtcggacagagctgcaatcgatggatcggaggcacgcactaggtcgtcgaccaggcgcagtagatctggaagaagaagaggacggcgacaccgacgatgttcttgaagaagaagttgaggatcctggaagcgggcgaagggatagacatcagccgcaatcggcacaaagcgcgcgagcgaggccgacgcacatgttcgagtttcgcaggtagcaccagtggccgtgaacgagcaacagccgcttcaggtaggcaaactggaggcaggggggcgtcggaaaggtcagcgacagcttcgactgcacggcagtgctgcctccgagcatgactcacctgagcgatggcatagtcggacgaattgacagcttggagaccctcctctcccgagatgccgacgccaacatccgcggcctggatcatcgaaacgtcgttcgcaccgtcgccgatcgcgagcgtcatgacgccgaggttgtccttgatgaggtgaacaatctgagccttctgcaggggcgagacacggcagcagatgacggtattgcaacgcgttgagagctgaaggaggaggtcctcggtccatgcctcggagaacgcctggaaggggtaagttgatgtcagcggaactacgcgcagggctggtcgtcaaaggacaagaaagagacgtacgtgagttagggccgaaccctcgatgacgagcgagtagccgcccggccgctggccgttgtcgtcgccgacgagatcagacaggcccgacatcgtccgctggatcggcttgggctgggcattggacgaccggttgcgctggaacgagggccggccgccgccgagcgagcggcgcgacgtcgtgcgctcaaggccgggcggatggtagttgacatcctggacaatctcgggcccaaagaattgctcgatcgccgacttcatctggtcgtaggccgagttgggcgtcccgtacgcgccgccacggacgatgatcaggttcgagtcgttggcgagcaggttggtgctgtagccgatggcgatcgccgtctcaagcttgtcgccggtcgcgacccagaccttgatgccggcccgcttgaggtcggcaatcgtctcgggcacgccgtcctggagcttgtcctcgatcgcggtcgcgccgaggagcgtcaggctgtgctcgagctgggccgagacgtcggcaatcttgccctcgcggtcgtcgagcgaggtcaaggcgtcgtggtagttgtgggcccaggaactgtactcatcctcggtaatcatccggtaggcgaggcagagcgtgcgcaggccctcgctcgcaaacatctcgaggtcggcgttcgtctttgcttttgcctcgtcgaggccgggcgcgagccgctcaaagatgacgttgtcggcgcccttgatgaggaggaagagcttgccgtcgtcgtcgagcttgcggaggatgaccgacatgcgcttccgggccgaggtgaactcgagaacctcgagtagctcgtactggtcatcgacgtcgctgccgggtgcgcgcatccggagcacgttgcggtccttgcccttgaagacaaagccgacgtcggcggcagcctgaacgagggccgactcatcgggcgactgggccgtgtactcgatgacgccgtccgtctcggatgccatggccgtgtggcagagggccaggttggtgaagaagccggcaatctggctgaagccctcggcctcatggtcgtcgagcgcgcggtcgaggtcgtccgagtggaagggcgcgagcacctccttgggtagcttgaccttaacctcgccgtcgtcgtcggcaccgcccctgacgctggcgtcatccttgacgacgtccttgagcgggtgctcagccgagctcgagtcgccgatcgccgtgccgttgtcggaaccgctgaccttggtcgtcaggccctgcgagccgagacctccgacatgcttggtgtgggcgggcagcgtcccctcgggcatcttgccgtcgcccttgtagacgatgccggcgatcgagcactgctggaagatcatcgcgttctgcgtgagggtgccggttttgtccgagaagatgtactcaatctgtccgaggctgaaggagcgacgctcagtcagctccagtggacaagtgcagcgcgcgcggcagggcgaggggcgcactcgtccgaaaggttccagctgcgggccatcgtccgcgtcttggtcttgtcgtatttgatgtcgtcgtcccagtagatgaagagtgcctggacggtccggacaaactcgatcgagatgtaaagcgagattgggacgatgttctggaaagtgatcagactgttgaagaaggtgaagaggccgttgatgttgggattgtcgtccgaggcgtcggcgtagaggagccagtaggcgccctggcggtaccaggtgacctcgttgaagtggtcgacgatggcgcagacgacgccggcaaatgcgagaatcatcagcgagaagaggctggcaggtaggcaagcgcaagcagtagcagggtcagcaggcggtcgagcaagagcgcagcgtcgcttaaaggaggggacccacacctgggggttcatttggcgctcgaccttgctccgcttggacggcgtgttgcccgagttcatgacgatcttggtgtcggcgccggtaaagatgacgacgccaatgacccaggccgtgttacgaaggacgcagccgcggaggagggtcgtctcgagactgatcgggtgcttcttctcggcaaagccgccctggccgtcggcctcagactcgacgacggccgcattcagtctgaacatgttgacgtcggccgcctcgcagtcgatccggaactgggcggtcgcgcacgagcgggccgagcgcaggtgggcgagctcggcgacggcgtgtcgcgacttgaggttggtctcgccatcgaggttcttggtctcaatgtaagcgatgtcctcctcctcggacgtcgcgcaaatggcgatgtctgcaagcgagaggcaagggcgcagcagcagtagtcagtatttgtcgcatgcaagcgtcaatccctgcatccagaaaaggaaagcgcaccggccgggaagccctcgtccttgtaaatcttgacaaaatcgccgactttgacgtcttcccagatcgtcttcttccatccgacctcgtctgccgcgccgtcggcctcgaggtcatccgacgcgttctgagggataccgtcgccggcgagttcgtcctcgcgcgtccggatcgcccgcaggtcctcgccggggaacgtcgtcagcggtgctgcccgaggcgaggcccgctccgtctcgtcgtgctcgtcgcgaacgatgcggtcccagccctcgcgctcgcgggccttgcgcgccttcttggccttggtctggggcagcttgatgcccttgacaaacgtcttggacttgccctccatcggattgtggttgacgtagccgccgccggcgaggacgtggacgaccgagtggttgaccttgcggtccgactggtgccgcttgacatcctcgtagccgtccttgagcgcggtgatggcaaggacgacgatgagcggaaggataacaagaccgggcgagatggtcgagaacttggggaagaactggaggatcgcgatgcctgcgaagcgataaggggtcgtctctggttagcttcctgagggctgacgggccgagctgacgtccgcgcgtcgtcgggctcggcgaggccgacgccagcagaagcgagacgcaccgaggaagaagatgttggcaatccggcggaactgacgagcatagaggaaagggcgtcaggatgtcactgttgtttccccggcggtcggccaaggcagcctcggccacccgagagagagaggggttggtggacaaccggggccaaaggatgaccgaggcagccctccaagagtaggacgcacctgctcgagcaagttacgcgggagaaacgtgaggaccgtgtactttgacgtgacgacctggctcgacgtgtagtgcgccatcttgggcagcttccccttcttgtcaaagagctcggccggcagggcctggttgatgtagaccgatcgcggccgcgcggggcgggccttgcgctggaacagccgggccgggttgagcgccgtctggaagtcctcaaagaactttgccaccttggacggcttgtggcggggcggcatggcgggcgaggcggccgatcgggtaagagggcgaggaggggcggatgctgtcggagggaaagagacaaggaggaggaggccaagtcggcggcgaggcgggcgtcgaacgcgtcaggccgggcgccgagcgagctttggtcgaacggtggagggcgctcgagggttgggtggtcactcggttcgcgcacgctctcgcttgagccccgggggttgggtgcggccgctcggagagggtcgcaggaggactggctgtctgctgtctttgagtaggctgaaggtaaggatggctgtcgggcaggcgggagaaggaggccaggcaaaggagaaagccagattgattcttcggcgagcttgacacgcgggctgaccgagcaggctcggcctcgtcgccgccgccgccgttccctcccaaccttgctcgccccgcggtggtaagccagcctgcactgctgacgagcaggacgagccagtcaagtcgaacggcccctcactccgagcagccgtcagccctgggccagctttcgggtcagagagcaaggagggttttgcgcatgtctgagccggactagctgggtcgcgactgtccgacgcgaggcagctgcgcgcggaggcggccgccgagtctctctcggtcggccgaaccgaggacaagccgccggcaaatgcgcgaggacagccatcaggctttggtacagggcagggacgcataggatacaagagagcaagacaggcagcgcgacaggtgggagacaggtgatcggagtgagggcgagcgatttctgcggaagggagatcggagggcgagcgtcagcactccggccatcgcacagtcacgaccttcggctcgggcgacgcacacttgtcctcgggcttcttgagctcgggcgtctccttggtgccgttgttgtcgggctcgcactcgtagtgcggcttcgacttgtcgcccgcgctcttctcgctcgacgagttgggcttgggctggccgtcggccgtcgccttctcggccggcgacttgccgtccttggacgacgacgacgaggcaccgctgtcggccgtgcccgagctcttggtcgtttcggccgggccgctaccgtagccagcggaagctcgggcgaccgtcgtcgtccggaaggcgcgagcaccggcgggggttgccgagcggagcgtctgggcgaagcggggagcgaaggcagagaggggcgacatcgtgctggaaggaggttgagctggaattggggctggtgctggcgatagagaggcagatcaaggggctggatgagatgggatgagcgtcagcgatggcatcttggctccgcgttatgaggggcggagggcggagggctcggagggagcaggtcgatcgaggcccatcgggcggtggcatgacgtcctctgctgccctgacgtgttggagtcgcgttccacccagaaaaccgcgccaggccttttagcctcatcgcctcttgacgacgcagcggaacatggtccagcgggtcgcaattttatgagaggcgtcggcgggggttcgtcaaggagaaagcgtacatgcgaaaggaaggattgagctggaataaaaggggggaagggtgaaaggccgccgcaaacaattacgacccgcgggcgaatgggtgcgagcgaggcgaaagcaggtcgtgaagcattgtgcagaggggcgaggtcggacggagaagccgctcaggcggcgctctccgccttgccgtatggattgacggcaaagaccttgatgacgggcgggctcttttcgaggtcggccgtgatgatgacctgtgcgcggcgagtagaaggtaaggcttagtgccgacacagcggatggacaaggagcaggtcattgggactcacaggaacccgcatgagctctttgatgtcctggatcttgtggctgcccgagctgagcgtccgaaggccctcgaacgccggggtctcgcgcgcggccgacttggcctgctggacgctcttccccgccggcttgggctggccgcccgcgcccttgacgacgatgtcctcggtcgcctcgtcctcttcgtcctcctcgaagagggccgactcgtcctgggcgcgcgtcgagacctcggccgcgacattcgcggcgcccgacttgcggaccttgtgcaggtgctcgtcgtcgtcgcgctcggcgataaaggcgaggacgtcctctaaaaagccagacgaataaaagtcagccggcgaaccccaagagaaagagcacagagcaacaagacgcacgctcgctccagtagagctgcaggatcgacgagtgctcgtcaaagacgatgttctcgagtggcatctggtcggcatggacgcgcttctcgatgccaaattcgggaatgacgacctgcgagcgcaaacagcaggtcagccggtgtcgtctgaaccctgcgcgatagcgagctcggacgtacatcgaaggcctgatcgaggacgttgacgacgttcgcctcgcggacgactggtccgtacttctcggtcaggtcctggatcagcaggcagaggaagaggtgggccgactgctcctgtgcgagcttggcgccgtccttcttcaagttgcagttttgcgccgtcttggcgaccgtgtcgcgatccatggcaaacttgctctcggcagctgctagggcgcacctcagtcagtggcctggcggacctagagggaagcgagggcaccactcacagccctcctcgaggcacgcggccagctgccggtgaacgacaacgtcggcgtagcggctgccgatggacaaggataaagtcagccgaacttgcagacgtagtcgtagccaggcaacgggacgcaccgaatggggctcgtctgcggggcagtaagcagacaggaggggtcagcgacgatgcggcaatgcggagcgagagcgtgcgtacaaagtgcgtgtagagcggtgcgttgagcgcgtaatgcgagtactgtggtagcgcagaagggagcgagagtcagcgcaagagtcactggcggcagcctcgcgaatcgtcacgccgcaccttggcgatgtcgagcatgccggaacagaagtacttggcccggtgcatggccttggtcgacatcacttcgagcagcttgcgcgaggccgtgtcctcgatcttattgaacgaggtcgagatggctccgccgctcgagatgtcgacgggcaggccgagccgggcagccttctggctaaagccctcgagtcggcgctcgaggggcgcctcgtgccggcgcaggagcgcctgctcgggcaggttgacggcaatcgtcgtggcgaccgtcatgttggcgaggagcatgaacttttcgtaggcggcaagaggatgtcagcctggcaacaatctctctacaagagaggcgtgaaacacgcacctcctcgacaaggctgttggccgccttgcgctcgtaggccgagcagtcgatcggcaggcccttgtcgtcaaggttgaagttgagcttgagcttgtcgatccggagggcgccgttctcgatgcgccgctcggccatcttcacggccatgtcctgttggtcgggagagaggagccaccgggcgactggtcagcgcttgactgggcggccccagtccatcgccgttgactcacgttcagcaaccggatgtccgcctcgacgtcgcccttcttgaagccatccgagatcgggctgtcgccgagcgacttgccctcgatgacggcctgcgcgtcctcgtaggccagcttagcacacgacttgatgatcgtcctggtcggccgaaagcgatgggcgagtcagcaatgtccaatccgggagcgactgcgtccggcacacacttggcaaacgacgagccgaggacccggccgtccttggtcatggtgaagaaggccgagaaggcgaggcgctcgacgtctgggacgagactgcacagctcctcgctcagcgcgggcggcagcatcggcacggcacgctggacgaggtagacgctcgttgccttcttgcgcgcgtcccggtcgagcgccgtgttgatcttgacgaagtgcgagacgtcggcaatgtggacgccgacctcgtacttgccgtcgtcaatcgcggtgatcgatagggcgtcgtcgaggtccttggccgtcgacggatcgatcgtgaagacgcgcgtctcgcgcatgtcgcgccgcacctcgtactcgtgcgcggggaacgtctgaagacgatggcgaggtcagcgtggcctgacgagggggttaaaaggccgcagacgcacccagggcatcgggggtaggcacttgaggaccgcctcagagaactcctcggatgggaagctgcaacaggcgagaacgtcagcttcaagaacatcacgacgttgtagccagtcgacagtgcgactcacttgcagtccttgagcagggccgatgtctcgacctcgacctggccgatcgggccgacctcctcgacgagcgtgccaaagggatggagcgacctgggaacgaggcggagcagtcagtctcgggcagagcaggcggcggggcgaaaagcgttcacgtgatgggccagcgtttgatgcaggcgcagaagaggatgttggcgtagtggtcggcattatcgaggaagtcgttgggcgcctgctcggtgctaatcgcgatcagcggcacgcgcttatccgttggcttgaaccagacaatcttgggccgctcggccggccgaggcttgtcggctccgggaccctcgcggtcgcggcgctcagcctcctgcttctccttggtcgcagctgacgacggccggaggagtccgagcgtgccagagaagagctggccgggcatacgctcgacgacggcgacgacgtgtccggcgtactctgcgcagaggatgcgaaacggtcagtgtctagctcggcccgattcgcggcagatgaggagacgcacggggcttgacctcgtccgtcacctcttcgtcgtcgaagagcatcatgccctggccctgcaaaagcgaagcagcatcgtcagtgggcgataagcgccggcaaggcagttcgagcggaagcgcaagacggacctcgacctcgacgtcgtccttccgcttgtcgttcttgcgctgggcggcctggccgatggcccgagagtcgctgaacgctgcgttctcctccttcttgcgcttcttgtcctccttctccttcttggaggcccagacctcatcgacgtcgaggagctcgatcgcaacagtgtcgccgtcgagggcccggttccggtcgcgcgagccagagatctgcggtgcaaagggggcacaggtcagtgaggcggcaggcaaacaggtgagtccaagagctaggtcgcacgtagatgtcggcgtcgaggacctcggtcgcgacgtaggcgtcggaccggttctgaggaggcgaagaagagcgcgttgcgatcagcactccctgacgagcagcgcgcgacagagacgcctacgtacccgcttgttgacgcgcaggacgccgatgacaagcttcccggcagcgagcagcggaggcagcgaggccgccggcaagtagggcgagaacagcgaccggcgctgggtctgctgcgactgctgctggatctgcgtctggaacgcctgcatctgctgcgggatgttaaagaacgtctgggcgttggcgtagagcactgcaagacggtggccgagcctcgtcagcgccatccaccactgagcctcagtcgtcggccaaggacatactgttgggaagcatgtttggcaaggcaaacgaggccatcttcgagtggcctccgccagcagcggcccggaaggcagcgatcgactgcagctgggccttcataaacacaagagagggattggctcagccaaagccacgttcacgcgcacgagaacgagtacggacctgggcctgggcgaggtcagcgccgacgttgccgccggcgttgttactcggtgccggtccgacaccaccgtctggaagcgagacggaggctcgtcagtcttcgacatgcgcagcaacgacggcgagagaagcaaatgacgcactcatccgccagctgctatccatcgcccggctgccctggcgcgagtggctcatagtcgcccctgcgccgttgggaaattggggcgggcccatcgcgctgtagtcctcggaggcccagtcgaacgggccgttgacgctaaactggccgggcttgtggccgcgctggaaggaggccgtgcgactgtgattgttgacatccagcgagacctcggccgggctgaagccggtcaggctcggctgctgccggtgagccggctgttgagcgacctggccacccggctggaactgggagaaggaagagcgcgggacggctggcgggaggtcgccaaaagtgttgaccgtcggcgacggggcgaccgactggatccggcggtgggcaccaatctgttggaggtgcggcggccggccggcaaagttcatcggcatgttgagagctgcctgcgggacagcctgctgcgatgcgctcagcaggaggtcacgttgctgccgctgaagctcctcaatctgctgctggaggcggacctgctccaagacacggacgagtgagtggttggacggaagggagagaggacagtatgttcgcacctgctgggccatctgcgggctcatctcgctcccggtccgccggtgggcgcgggcagcgaggccgaggagggcgctcatgcctggcgcaacgaccggggcaggcgcatccgagcccatcgcaaacgactgcgaccgggccacgacctgctgtgcgtcgtcaaagctcatggccgccatggccgcctgctgttgctgcatttgctgctgctgttgcttctgctgagcgtcctgcccagcagactgccgacgctggccgaaggtgaaggtcggggcaaggacgggccgaccggtcgggccgaggacctctggttcgacagcagccggcttctggagggcctggaagcgaggagcagagaactggcccatcggctgctgcggctggatgccctggggaagctgccgcgcggccgcagcggcaccgccggggacctgcttgcggacttctcgaccgggtgcgtcgtgctcgacctcctcagagagctggtcgaggggctggcgagacgggtgaaaagtcggcgcgttggggttgggagcctttgaggcaacgaccggcgagggcggcgaggctgcagccgcgggggtgggttgggggatctgaacgaagcagcctgcgtgtgattgtcgttcttgccccttgttctgcggtctacttgctcaagcagagcccccccccctcctttcatttcgcttcagatgacgctcactgactggccggctcgcccggcccgcctgcagcaaaatctccgccttgtcctcctccatgacaagaaggacaattcgaagtgggtatccctctcgcgttcttcctgctcgctcccctccgtcgctgatacaccttctcccctcgctgctgggactgcgactacgaatacgactaccagaagtgcgcgcccctcctctttctcctcgtctactttcctcgattctcgctgacccttacttccctctcacccaccctttctcggccctcactctccctccggctacattcgccagctgaccctcgcaccttctactgcgcgaccgacttgcccgtcgacgagaagatcagctggtgcttcagatcaaccagagctatctccattccgccgctcgtcttctcgcccgccctcatccttcgccgcatgctgcccccttcccatggtctggctgaccgacgtccagaaggtttgcctcttctgtcctgcccttcgctcattcctccagctattgatgccgcctctcctcctcgcccgcgacagattggcgtcgggtccaccgtctttggcggcctcttccaggtgcggtttggacagagctcgacctcgtccggctcgctatggggcgagacgaggtggctgacccgttgtgcctccgtcctcttccttcgaatagtcaatcggcgtcgtcatgctgtttgacggcgccttgctcgctgttgcaaacgtcagtccctatcgctccctctcccgtcgaggcaaaacgagccaggctgaccttagccctgacatgctgcgctccctccggtcaacccgcctccagatcctcttcctcgccagcatcaccgccctcatcgggccgcgcaagacactcctctacttcgctcgcaaggacaagctcagggggacggccgccttctttgccggcatcttgcttgtcttcttctttaaggtgcggcgtgaaaaaggaaagggcagaccgaaggccggccgtgctgatgctctctctttcttctcttgcaccccgcccgcagtggccgttcgtcagcgtcatcattgaggccttcggcatcatcaacctgtttgggtgcggcctgccatgccatgctctgcagtcgctcaacgcagcgcgcttttcgacgcaactcgctgaccgtctccttctgccccgccgcccgccgcagcgacttcttcccaactgtcctgtcgttcctccgccagctgtcaatcatcggcaccttgctctcgctgccctacatccgcggcgtgtgtcccctgcgcccgctctcgcgacctgcccgcactcggctgaccagcccctttcgtcgcctttcttcgactcgcagtctgcggaccgactggctgggactactccgagcaggagggcctgagctgtcaacacccatgccctcgtttgcttccccgcgcgcgccaaggaagcctttaggttcacaaaaaggcatagagcgcccaagtgtcttttgaggtcgaggcgagagggggaggaggttttacttgataaagggacggagcgtgaggcggcgaacgagcggcaggcgaaagaaggcagaagagagagggtcgggtgggctacagggtggagatggtggtgggcagggagcggacagtaaggtgcgagtgaacagagtgaaggaagggggcaggcaggagtcaaggaggggacgaatgtcaatgagcgtaagcgtggttcatgacatccgccctacttgcgcgccgggtagtcgtagaaccccttgccgctctctgcgtaggccaggatgaaggggtcagtcggcactgcacaatcgcgacgagcggattcaggacgtactcttcccgacccagccggcgtcgaccatccgcgcgagcaggacgctcggccggtacttgctgtcgcccgtctcggcgagcatcgtctgctggatcgagaggaccgtgtcgaggccgataaagtcggcgagctttagcggacccatagggtgagccatgcctgtccgaaagagcaggtcgtcagcaaactatcggggagcagaagccgacagagcagagggcaatgacggaccgaggacaaaggtcttgtcgatgtcttcggccgttgccgtaccgctctcgagcgtcaaaatagcctcatttaggaaggggatgaggacgctgcgcgaggagagcttcagcgacacgccgacgagtggcttggcagcaagagacttacgcgttggcgacgactagccggtgcaattaggtcagccaacattgaaggcagggacaagaagcagcgtcgtgcgactcacaaccgggcacgtcctttgagaccgtcacctctttgccgcacgcctgggcgaacgccctcgcgcgcgtcatcgtgtcctggtcggtctggagggccggaatgagctcgacgagccgcatgaccgggacggggttaaaccaatgcaggcctgcagaaccagttgagagcgtagagtgtcagcccggtcggtctctgcttcagggcaggatgaatggccgcaccgacgacctttgccgggaagggcgcgaacgaggccaggcgcgagatcgagagcgacgacgtgttggtcccgagcagcgtctctggccgggccgcgaacgtctcgtgaagactctcgatcagggcccgcttgatctcgagcttctccggcgtcgcctgggtgggcaggcagcgcatcgctgggtcagcgcttcatcctgcggcgccagacacgtgccgatccgcttagccaggcagacgagctcccagctggtcaagctctggtctgcgcgacagcttgcgggtgcatcggcgctcgagatataaggagaaccgacctccatgatgagttcgaccgcttcctcccgctcgagcgccttgaggtcacggaggtcagggagcgggacgatccgcgcccgggcctcgcgcgcagcggcttcggtcagcttgcccttcgagacgtccttgccgagcaaatggtcgatctcgccgagagctttcggtgacggggggataggaagaaaggcgatgggcgagggcacagcaaggtagagcgaagggggcggtcagttgtcgtcggtcgcgaggcaggcaagacagcagggtacgaagcacgaggcagcgcgggctgacagccgccgacctcagtcaactgctactgccgaccgaggcgcacgccagcccgaagcctcctcggcgactgcttcggcaagacggccctagcgactaacctcgacggagtgctgactcgctcggctcgtacagccggacggccgccttcgcgtgcagggccgagacgagggcgatgccgagacccatctggccggccccgaggacggcgacgcgcgagatggctggcgagactggagacatgcgtgcgagtggaaatgagctgtggtcgactgatgtgccttgtgatctgctgctgctaaaggaggagagctgtcgacggtgaaagcgttcttggcctgtcgtcgcctcggagttcggctcgcgtcgcagccggccgcatggcttacgtaacttcacctccgaccttcgaccgtccccccgacgagcctccaagcttcagcccagcccggctcggcgttctttctcgaccaacgacctcgagggtcaaagcgctcgcacgctagcatgcctccgatctgagtgcggattgacgacggtgctcaggttgagcagcagacggtgcgtcacccttcggtgtcgcgtgcgatggcgctcgctcgggtcggacgcgtcgcgttgcatccgatttcgtcttgccctcgcagcctcccgcttccgcctgaccattggcttgaccgacgcctctgatacctctagtaaccgctgtagctgaacgccgtcgccggaccttcaactcctgccgccaatgaggcggtgcttgtcgttcagaccgctattcaagcgccgcagccacggacgcccggcggcatctgcgacgcttgcttcccttctcgatcctccaatcacaaaaacagccttcaattccaccagcggagacatcacgtcaatgtcagcgtcatcagggcttgtgacgtgacatgtgcgtcccgcgagcgtcagagtgcgccgggtccctgacgctaaccagtcctccgcgccgtcgtactcacagttccagcgacagcaagacgttttcgtctgcgcaggctgcccgttcacgacatccacggccgctggcctccgaggtcacatctcgaagtcgtcgcagtgccctctcctcgaaaagtggcgcagcatcgagtttccttcatcttggaccgtcgtcccgcacgccgccgaccggaccagctcagctttgaccagccggcccagcagcaacggtcacgtcatggctcttagtccggcgccaagcgacattccgcctccgccgaagcgcatccggctgaccatgtctggccgagaagtccggccaccggcgcggtacgaggccgccgtcttgtccgaagacgagatccggtccggctctgtcgacgatcgcgacgagtcgtcgattgaagactaactcctggccgacatggctggtctcaaccaggttgcgtccgaagcggccgttccggccgcggctagaacggcggccgtcgccgcctcggacggcagcagcgactcgcaggacgaagagctccggatcgtcgcctggtcgtcaagactgtcgtccgagtcgagagcgaggagggagccgatcaagtccggtgggtcaaatgacgagggcttcatccggctggcccagagcggccaaaaaagacgtccgctggggcgccgtcgaccgctcagtcgactgcggccttccgcgcagcccggtcgcctggggtcagctttgctcgccattctgcgccgctgcgcctctctggaagccggagcggcaccagtccagaggaggtggtgacgctcggctgcacgaacgctacttggccggctcgcagaacgcgcctcagtcgacatcagcgtggcctgaagacgagccctcactgccggccgcttctcgatcgagtgcctcgcttccggcttcgcccgtcctcgcagcggccgagcagcggcctctgccgcctacggtcggacgacagagatctcccccttgccagccgcgctcgccgtcgccagttcgacctccacggccatctctttgcccagagccggcatctgccttagcacaacccgactcatcgcgcgctgagacgcctgcagagcaaggaatctcaatctggaccgaagccgagctgccaccgtcctgctgcctgctcgactcggccgatctcgctacggccaacgccgcccgacacacgttcaaggcggcgaaagtcgccgagctcggtaacgtcctctgccgcgtccggctctaccgctggtcggcggccggcctggcgctcgactgggttcgcgacgaacggcagggcacctggacgcatccgtacccgcccgagatcgttcgagcgggcacgaccgacgactgcgtgcgctttctcgaggtcgaggaggcggttgtcgaggcctgggacagaagcatcatcgctgctggcgagctcgacgaccggtccggcattggcatctcgtgggagcggctctctcacatagcggctccgccatcgactgccgctcaggcaccagatagtgccctcgctccgccagcaccagcaccgacactggcgtcgcgacctcctgcgctaccactggaagccgctccctttccggtcgcacctctatctgccatccctctgcctgccctgccactggcagagcctcgactcttggcagcaacatctcgtcaagcttcgccggacgagcaacaaccaccgactatccgtcaagcgtcgagcgtcgtcccggaagtctcgtcgacgaccgctagcagcagctaggccgccgatcggccgctctcgcctgagcctgagccgctcatcatgtcgtcgccgccaatcactccggcctccatcttcgctccaccggctcccgtcctcgagcaggcgacggccgtcgcattcgttaaggaagagccgcacgaaatggttcttgacgacgtcctgctcgacccggcgctctacgtgcggccgggcaatgcaatggccgtctttactctgctgccagaccttgcagtgcaggcgtcgaggggtttgccggacgcagcaagtgccgccgcccgagctgcgatgcacgaacagttccgccctcgcgtcgcgtcaagtcgctcagcaaggccagcgcgacgcgaccgacccttctcgtcctcgaccatcacacccgactgctacctttcagcccttcatgacctgctacccgtcatgtcggtatgtcgctcgactacccactgtcgttcctgctgcccttgtactgaccttgccctctctgcctcggccgttgcccccttctgccgtgtctctcgaactcggcatgccagcagcatcatctcgccgcggactctgcctcgccgacgtcgtccgacctcctcatgaaacaggtcgactcggccaaccgccggtttgcctctcctcggccgagctcgtctcgctggcgtcagcggcgccgcgcctgccgctgccgtcgtgtccgacgttcaggcgtcgtcgggtacgagcggccagacccgcttcggctgcggcccatccaacgctggaccggccttgctcgactcctctgacgcgggcaacagccctctagccgcctcgccgtcgacgttgacctttgaagggcaacttctgctcagccgaccccgctcgacggcctcgtcaagcacatcgaggtcgctgttcagcgcactgccaacctcggattgagcgacgtcaatcgcggctgccacgctctgctcgctctcgtcaaactgctcgacccgctctgctcgttcctccccgtaggcctttcgagcgtcgagagcgaggcgatgctcgtgaaggttgccttcggccggctcgtcgaaccgagcgcagcgctcctcgtcgaggcggcgtcctgccaaagtgtcttcgggccgcagagcgacggcgagcggatggacgtcgacggactctcttccgacggcttgactggcctccggcggctcttcgacgccgctcagagtgaggttgtcggtggcgaggcgacggcgccggtcaattgagaggagggagccgcgagcggtccagccagcgcgcccgcctcgtctcgcctcgctcttcgcctctcgcaaacctcctcatgccgaccctctcttcttttgtagctctagtcatgtcgctcgccagatcgaccttgattggcgcaatggcgtcgtgtgggtgtgcctgcccttcaggcggtcgctcgctccgaggaaactgctgcgcgccggaccggcacaaggctctgagccggccggccctcctctctcttcgttcctctctcccatcacctctccacgtcccacgaccgccctctcacctacgcttatcgaccgccacgcctgctggattgagtcctcgaggacgccatgtcggtacgtcgcgtccctcgctcgcatctcgcctccgcgcgcgcccctccctgacggcgctcggccctccccctttctcctgtcacctctccgctcccagtcgcctagctcgcccgtccggccgagcttcaacgccctcttcggtatctcgagctctcccggcagcgagcccttctaccctccgaccctgtcgtcgagcggccagccagctaagcggccggcggctggcggaggcgcgcgcgagcccctttcgagcccagccggctcggtcgcctcgtcgcccatgaccttcaaggtcgtcgacctcccgccctcgaccgacctggccgccaagcgagctcatccgccgtctccttctcctaagcgacggatgaccgcaaacgctactttacctccggcatcagccacgccgggtccggcaacgtcgtcgactagcggaagatcgaaccggacgcaggcgccgttcgccttcaccgtctcgacgacgaccaagtcggccgactttccgttcgtctgcacctcgtgcgagcccgagccacgcttctttgcgtcaaatggcgcgcgcaaggtccaccagcggatcacgcacatgcagatctgcatcgtccatctgccaaaaagcaagggtcggtcctaccccctgtcgcccctcttgttgttgccaaaaacaagacgctgaccgctcctcttcgtctcgatgtcgctcagcctacgaggtttcgcgtgtccacggcgtctttgcctgccctctctgccagcggaccaacctttcgaccgacttcctcaagcagcacacgtcgcgctcgataaactgcaacgtcgagcagctcgcagcgctgccatctctgccggccaactggacgctcctgcccggcggtgtcgtcctcggtcgcaagcccccacgcaaggccaagccggtcctcgcgccgattcggacggccaagcaggagccggtcgcaccgcccgcgccggacgaggtctactcgggccgtcgtactcggtcgggacggccagtcaaggcgccgacccggtttggcggcgcccgatcccagcggtcgtcttcgatcctctcgtcgctcgctgccgcaacgagcgagccatctcccccgccggtcgagactcccgtctcgcctccggctgccagcgcctcgcgccgcaagacaaccggcgccacatcgaccgccgacacgccttctgtcgacgccgtcttcaccagccactgcccgtcggtcgccgaagcgctcgatgcgcaggagtggcaggacgagctgcctgcgcgcgaccgaccctggcggtctcgtcggcggaaggtcgcgccacccgcctcaacgcctgagccttcgaggcctcgcaagcggccagtcaatcggacggtgaccactatgctgccagcgaagaaggtcaaaggccggccgtcgatcgagtccgagcaggccaaggccaagacgtcggacgagccgctggtcgtcggaccggtcgcatcctacagggccggagccatggacggcgtcgagccgtatcagatggtcgcctaccctccggctccgacctccgcctttggcaacgagctaccgagcgcagcccctaccgccgcagttccgacttggccggtctacccgccgccgaggcgtgcgcaggcgccgtggcagtcagaggcgcatcagacgccggttccgacgctcggccagccagctcgcaacctcagcgtccctccaccgcaggcctaccggccgctcgcaacgccgactgctgctcgtcgcgtgagcgcttcgttcgtgcctgcagtctgggcggctccgacgtcgtcgtgctaccccgaggcggccgcgttcgctggctatgagctcgccgaccatcacggtcggacgccatttgcccctccggctgcctttggctcaggaccacccgactggtcgctcggcctccccatgccgcggccctggttcggccaggacgacgagtggctcgacccgagtacgtccgctcagcctctgcagcagtaaggacagcgcgctgaccctctcgaccctgacgacagcggccggccaccactggcacaccggcggctttgcgccctagcttaagaacccttcttctcatctccttccttttgacctttctcgtcgacctctttctctctcgcgcacggcttgcagcgttttcctcttcggaccaccagcaccaccctcactctgatacccacccggaatcctgtcttccttgaacatgctctctcttgatggtcttgcactgtagctgctgcgttgtccgctttgagaggcgggcgacgcgctgtcattcgagtgctcgagccagcgtcgtgcgagtagtcggcgcccgacgcgccaaactccggcggccggcggccccttcgccccttcgttcgaacactcttctcgtcctcagctcgagccagcctgcagctctgctcagatcgtctcgtgcgtgatatcctctgagctcgctgtgttcagccgtcttggcgtcgtcgagtatccttcgaaacaggcactgactgcccgcaggcacgctcgaacccctttaatccctcggcaggccagcagcggcacgatggccgtcgacggcttttacggcgcccgagctgccgtcagcagctcggtctcgtccagcagcggtctctcggaaccgagctcgtcgcagaatgacctcagtacgacaacggcgcactcgacgtccgctcctgcggcggcctcggcgggcagggccgccttccctttgacgcagccgcttaccctgccggcggtcgctcggccagccgcctatctcaagagcttgaacgccggtccttcgagacgtcccctcagaactgtcatgagcagtgcactgatgcctttctacaggcacgcttatgagccgtcgtctgatctttccgacgacgacgctggcgctggagcgccgctcgcggctgcgccggcgcctgtcggccagcgcaaggccgccgtctcctctccgacccgcacgagcgagcatcgccttcagtgcaaggactgcgacctctggttcggacgtatcatcggcgcatcacgcacactctcgcgacggtcgacctcggcggcgggcgaggtgagcttgtgtgcgcgcgcgctgcccctttctagcgaccgccgctgacgctcgccgacctcgctcgcagtctacacggtcgcccgcgagaacggcctcatctactttccgctctgtaaggaagggagtcgcgaaaactgtaatcttcgcaattacctcaaggccgcacgtctgacttgctcgccggccggcatcgccgcgctcgctcacctcccgacgagctggttgctcaagtcgggcgaaccggcatcgccgattgaaatagccaagtcgcacaagcgcaagtgcaagttctcgaatacgacttcattaaatcggtcgagcgctccggtcaaggcgccgcgtatcactcagtcgggccgacttgtcaaggcgccgctccgcttcggctacgtcatccgagacgagtcgtcggacgacgaaatgtcgtcagtaggagacggtccgtgagacctatcctactctccgccgacgttgccgctcgtgctcgacccgactcgacccgactcggccggtcgtcctgctcgtctctcacggcctctcgtcggtcgacgccctcgcagcgcaaaactgcctcgactcgatcgaacggctgctggcggtggcccatccaatcttaccgccagactttgagcctcgtgctgtagggccggcagtcgctttgcgcgcttggtccatcgcgtctagcccggagcccgaggccgtcgagtacgccgtcgttactcttcaagccgtcggatgggcctcatcgtccccgcacgtcacctcagactacatcttcattagcgacgacgacaatgtgtcgacgacggcagccttcgagcacagcgaggacgcgaaagcaggcgaccagcctgaagtcaacggcacggccggctctggcgcaaaggttgtcgtaaaggcgcggccgataattcaatgcccggtggccagcaacgagcagggacggccagccttcctggcgctggagcttgcggaggatccggaaatcgtacccccaacgccggacgtcgagcgcgctgtcggttccggcgcaggctggttcgctggcttcggccgagcacttagttctgaggcgggctcttgcggaggaggatcacgcgaaccatgtcttccttttgagccttccggctctctattcgtgtcagtgcacaggttcataggcagctctctatcgtaggcacttgcgcaggcacatggaggacgggaacgcgtctgcgtcacagctccgcgttcagctggcccgcgcgcctgcgccctcaacttcgacctatcgtcgacgaccctcacctactgagcgactcaaggccgccttcagacgcccagcatgccggtcagcctacttcgactcgtgcttgagcgctgacgtcccaagtccgcgacagagacaaaagcgacggctaacggctgcacctgctcctgctgcgcaacaaccacctcgacttcctgctcgtcgcttccattctcagcaggcctcggaacgctccctgaagacgactgaagggtcatccgacggcggcttcagctcgctctcctctgtcatctcactcgaccagccggcggccgtcagcactgcacctcccgttgtcgccgccgccgccacccctgctgccaacgatccgccggcccacgcgtctttcgcctcctcgtgcaagtacaagttcaaatgcaagtcctgctcgcccgcgaccttctgggactcgctcggcacacgggcctaccaccaggtctgtcgggtccgtcctatgacgtctattagtgcgcggctgacgtcttgcttgcttcaaggcatgcacacaccacgtcgccaaggtcgccatccagactggccttggtgcgccgccttcttctctgccgcacaccgtcatcctgatcagccttggaagtcggctcaagacttgacgccaaccgactgacggctgcctgcccttacagtatacgtcgtcgcccgctcgcccaacggccttttcctctgcccaatctgctcgacctcggttgcctcggcctatgcttttaccacccacgtcgtcagcacgaaatgcgcgataggccggcgctggcctattgatctgccggcgacgtggtccgtcttgaaggacgtccgggagagcgagggagcggcgggcggcaagggccggccaaagaggctgcggacgacgaccgacacgacgaccgacaagggcagggactgctcgacgtcggcttcgggctcgagtggctctactgcggccgatccgttgacaaggccgcgggaaaagcgggccaagctgtcgcgctcgacgaacggcgacaagtcgacgtcggccggctcgtcctcggccgctccccatcgggtccaggtgctcgacccgacgctcgtcatcggcctccctctcggcctctcgcccgggctcgacccggcagcggcaagcgaggcgcatgcgctcgtccggcggctgaatgacgtgcttgctccgctccggccggtcggtcagccggtcagttacgacgccggtagcagcagcggggacggcgactccgggcgtgagggaggggccggtcgtcggacgagtgacggaagtgcgtcacacgacggcacgttaaacacggtcggcacgggcgagtggtggggctggctcagccggccggcgtcgtgaagcctccagagtggcatcgttggcgcgagttcgggaaagagacgaggtgaggcgaggctagcgacccatgccccgagcactctttgatgtgctcctagtgtctgatctgccggtcgatcggcgttgtcatccgtcagcagggcgagggggtcgaggtcagcagtcaagcaaggtcccgtgattgcgccgggaccaaagacatcaaagcgtgaggaccatctagacgcagccctcctcgagcaccttgacgagctcggcccacttggatccgccggccgagaaggggaaaagcataagccctccacgctggtcgaggccgaactcgagcgggtcggccgcgtcgcgcgggagggcgcgcgtgaaggggtaggtgagggcggccgaggcaaactggcgggatggagaaggggagatggatcagcggagtggtggaagagggaggagagaagcgagggacgacgcaccctcgccaagagcgagtcctccgggtggaacggcaggaggccgtccctcaggtcggccgagtcgacgtccatcgcctctgcctcctgcgccttggccttcttacccgccttgccgcccttcttgccggcgttcgccttcgggaaattcggcgggaggtagagcttcgagagcaagaggaggtgcgtgaagccgtacggcttgccgctcgccgatgccgagctcagctcgtcgccgagcatgcgccacagcggcggttgcgtctgaacgggcatgttgatgagccgctcgctgatgacgaggccgacttgcggcgagctcgctgtcgggggctgggtgagggagccgagaagggccgagagctcgggcgaggagggcgagcgggcccggaggtaggcgaggagcggggcgacgtgcgggttggtctgcggaagggaaggacgttcggaagggtgcgaatcagcttttaggtcgggctaaggtgggcgtgggcctgaggaagacctggctgcgcgacgcaccgcatgaaggttcaggttgaggacgccgaggaagctgaacgggtcgctgtcctcgccgtcaaccttgatggtcgatccaacgccgtttgcgagactctcgtcgagcaggagctcagcaagcggatggaggtcgagctcgtcggcgtcggtgtagaggagctgacggagaagtcgcttgagcgcgatcaggtcgaccgacgggttggccgggaagaagtcaaagtcgacgtcgatgagcgagggcgccgacgagccggacgacgaggcgttggaggcgtcagactcggagcccgagtcgacggcaccgccagtagacttgcgcttggccatcgtgagggtggaggatggttgtgggtgaggggaggagggaagaggagggtcgaggtcgagaggtcgacaagacagagcaggaggaggaggaggactgcgcgtcttcgctcgaaatcctcgaatcgtcagggcgggctcaatgcaggaggccgaacgcgcgcagtcgcagcccaccccgcgcgcgcgcgcgcgaccgcggcccgatctcccctcctccctttgaccagcaagcagcccaaaggccctcggatgaccgtcctgctcgtcctgcatcaggcgaaagtcagcctggcagacgccagccatgagcacgtcgctggcggcgaactcaggtcggtgccctgtccctccgagggaagcaacagcaagcgatgacgagctgacgcgcacagcctcctccgctgatccatctccccttctcctccctcgttatacccgcgttattcgcccttcggcagcgctcactgttactcgcaccaaatccgttcccgccctccttcccccgggggtcgcgcgggaccggtcaggacgacgccctgacgtcgccctttcccatctacctccacggcttcaagggcgatgagtcgaccttcctcgagttccccgagcgcatgaacctcatcgccgccgagacgctgccggactgcgtcgccgggagcgtcgtcttcttaccttacgaggtgcgtcgcctctgcttccgactgagctctgatgccgtcactcattgctgaccgacgaaccaaacgacctgacacaccaaaggcgagctcaccgcggccgtcccccgcttcatcgactggctcgcgatgctcatcatcaaaaagaagaccaagcacatgcagacgcacggcgacaatcagcccaaggctcgcatcgtcctctgcggttactcgtgcgtcttgttcagagctgcaggaccttcagacgtccgcttactgacccacctcgtcgctccaggatgggcaacctgctcgcggctgacgccttcatcttaatctcggctcagcactccgaggctaaggcgtttatgtggccgcggatcatccgatggccggccgaggggcgggcgctcgagcaggcagtagggaaacaggcagcaggctcgcgacgttcagcggacagagggatgagatgcagcggaattcatggtgacagagggcggcgtttcgctggcgtacgtgcaccggtgtacgaacgcaactgcatcgcaccaagctgtttggctctgtcgctgacccttcatcagctgcgatgactccaacccgaggctagttgaggtcgaggcagatagaccgcatggatggggatgcgcaacaagggagaaggcgtgcgggggggggcagatcaggagcgcgtcgagcgaccaggctgcagttgggcgggggcctgtcgagagggcgcacatgcagcggtcagcatcccctcagctgaagggagagcagccacgacgtacccttgtgcgaccggctgaccgactgggagtggcagaacaagagagcgatcaatagggaagagacgacattagaaaaaatatataaaccaaagcttcaggagactgatctaaaacttcagggaatgttacatcgacaccgcttagctcagttggcagagcgtaggcttgtaatgtttccacttgttcgcctcaggtctccggttcgattccggaagcggtgatgttttggtgggcggttcacggctttttgtttggaaggagctcctcttcctcttcaaggagctttgcttcctcatcaggtatgcaggcatcatggggtagcacttctccctcagctggcatcgtttgacctgacacttaacgctgaggcaaccgctcgtaccctttgaatgacggacagcggccgacgccggagggtcggccgtcgactgcgcattcggcccttcccctttgtgctccctccggccgcgcctcctgtcgctcctttaaccaccactaccagcctcttgttctcaggtcgctctcctcaccctagccgaacaccaagctcaagccactccactgagcgccgcgcccattttgccttcgcccacaatagggtgtgcttgagaaacagtcgctcgcagctgcctcgactctgacccctgttcgacctgccacccatctcactctcgccttctgcatccggatcgagcaggtccaacagctcccgctactaccgctacccgccgccgccaggcatggtctgggacgatggcggctactacggcacgccttctcactatggtcagcgtcccgtcgctgtcagccctcaaggcggtgctgatcttcccttccccctgtctgtcgtctcgcgcccccaaaggctacccaggggctgaggccggctatcgctacgatcgttccagatatgactacacgccgcaagggtacggcgtcgacggctacatccctcgtggtggcggctgggatcccaggcttgactacgactaccagccgccgctgccgaactggtcaccgcagcgtgactggggtggctacgaggtccatcgcaggcgacggccctgtttctcgaggtctaccaagagctcatcatcttcatcttcccgacctccagtttgccagcgctcaaggacggggcatgagacgcggcctgtacgacgacgtcaccggccgtctgggcggctgtacgtctgctcggcctttcgacatcgcttgcagaaactgatgcattgatcattccctaagactacgacgacttccgggctgacgaggcgttcgcgcggggctctcatcgtttagtacgccaggcctatcagagcacgctcagaccacatgctgactttggacgctgcgcgccttccaaaggtctacggccaccgcgacccgtacgtcgctgtaactgaaagaggcgagaggacgtcgatgctgaacgtgctttggcctacgaaacaggatacgagcctcctcgcgcgaactcggagcggccgcggcgtacgaggcctttctgatctgggatcgggcggcgcacggcagccgaggatggggtcacggcgctcgcgggcttgagggtctgatcggtctagcgactggtgaaggtgcgtctggatttctcgtgttagacgctagccgtaagtgaccctctgccgtacctcagcctggaacctggcagccgatgttggcgccgatcgcgatccgagacgggaggagcggatcctgcgcaccgcagctgctacagcgcgagcgctctacatggacgtgcgtctgttgtgtgccttctgtagcgtattcggcagtccttcgctgacgcccgtttgaatctcaacagcagcagtgggaccgcgtcgaggacgagtgggccgatccacgactcatcgagccctactatggtagcgccagctcgcggacgcttgacctcgccccgcctcggtcgcggcgtgttggtctcgggtcgttctcatcagactacgggccaggatccgggccgctgatgagccgccggtccttcgacgacggcctctacggcgagggtatgccctttgacccgactctcgacgcatctgacgctgaccgtcacgcagctcgcatgcctctttcgctgacggcaccaccgcgcggcggcggctactacgacgaccgctaccgcaagtcttcacctttcgttcgagcctgccatcaggcgcagcactgacgctctcccctttcgtcccaccctaggctactgaccgcctcgctccttctgtataatcggcatcgtgacatccactgccaaatctacgtctacaaactaagccgctggtggaggaggttgcgctaacacgagcccgatggaaggccgcccgccgagctggggatagagggccaggtgacgacgtctgcgccggcggtagacggtcgcgagcagaaacgactcgaccttagtgatgtcgatcagtcgccggatgtggtcggtgcgctctcttcggcgtatgagctcttcgaggaggagggccagttcgtcgtcgaccaggacatggtgcgcgagtagctccagcatgccggggaacgagatgccgtctgggaggcccgcctcccgatagagccgttcgaagcgttgccggcgctgcttaacgagatcgaagtcgaagcgggagaggacttcggcgagcttgcgagtgtcgacgcaggcacgcgcaccctcgacgacagacgcagcgctaggtgaggccgaggcgagggcgaccaagttgcggacgctcaagtcggccggatagggcttgacctcgaggacgcccgacagcttgtagagcagcgtcccgacctgatatcgcgagatgcgcccggtgcgatcgagatccgtctctgcccaggccctcttgtaggcccggagctgctcgcggctgagcgacgtcttgccggggagatagaagacgtacgagaaattctcgacgacgcaggcggtcacctggttggaccgtgatgtcagcgtcgacatagagccctcggtcgaaagaagagggagacgcacgacgttgacgaagaggtacattgagaggacgttccagctgataaacatggcgtaggcggccggcgcagagccgcagtctgaccgcaggtagaggttgtcgcccttcgtgcagcgtggccaggaaagcgtgtagtcgtgcatgtagccgttccagccctgggccgatcgaaagccgtcgtgcgtcagtgaagagtcgaacgtagtgtcgtcgagagggttccctcacctcgccgttggtgaagactgcaagcatgacgagagttgtcgcaaagtcgcggaaggagatgtagctggtagagcaagctctgcgtcagcggcacgagcttgccgggtccttgagcgaccagacgcaccggttctcttgcgtgttgtgctttgtcaggccgaaggcctcaagaaacaagatggcgtaaaaggcaaacaagacgagccagagcaagaacaggctctgatgtcggcggcggcagcagagtcagtgcgacaggtcacagacgtcgctcgcgccagggcagcgactcacagagatagccggaagagaagccctggaggggtgcgtcgacagcagcatggtcagcaagtcaatgaggacagggatcgcgaaaaagcgggactgacagggccgtcctcaagagctgactgaggcggctcgaccgtttgacaatattcaggcagagaccgacgagaaatatcttctgcagctggccgacgaccgacgtcgagaggagggcgctggctagagagacggccgtcgtcgtgcttgcgccagcaatcatgacggctcggaatgtcgaccactgggagcgcagaagcggggagacacatgagcatgcttcgcccgtccacgcgaggatggggagggcgacccttggagctcaccttgtctgcccggaagacatgccagccgagaccaaggtagcgcatgagtaggtcgcccgcgaagacggtgcagaacccgagaaagaggcagtctgccgtcgccggcgcagagatggaggcaatgatcattagttgccgtgagagctgtgatgcaggacgaccctcgcacctcggacagtattgccctgccctccaggcgcggagttgtcgtaggtctgtgagagcagcgtcacgcagtgcacaagatagaccaggccgatcgacgtgttccaccagccgcctttgcttacggcgcggtcgaagcaccatgatcggaagccggttgggcgctccgtcggctgtctcgaaggtcgctgttgccagatggtcctgcgtaggtcaacccagtgacgctgctcggtcgtaaggagagcggcgcccgagcgagcgctgaagccggcgaggatgatggcgacgaatctgtggtgcgaagaagtcatgtgcgttagctcgtgacgctcacgcaaggggtaggagccggcgtatcggctcacagtgtcaggattaagacggctccgaagagcgtgtaaaaaacaaggaagagcgcgttaccggacgaagcgttgatgcgcggctgttggcctttggtcgtgatggccatcagcgagcccatggctgacgtccagccttcgagcgagatgatttcgaacaggatgaggagcgactgagaggtcgcgcaaggagcgagatcaggacgaattgctgggcgcggaggaaggacaagacagacggacctggcggaagtcgtcaaacgcgtacgcgccgccatcggtcgggttggcccagacttgaggcagggggaagccagagccgacgccgtcgatgggcgtcgcgagaaactcgccgatgcagtctgcgcgatcggcgtcgttgttgcagctgaaaagttggccgcggaagagggtgacgccccaaacggcgtacggctgggcaacgatgccgatggttcgtcgagcaagtcagcgcgctgcggctaagcgagagaaggggcacagacgcacgatcatgtacaagacgacgaggacagacgcatcgacgatcttggacgccccttggaggacggcagtcaacgtcgcgcgcagccgcgaggagaggctgattaagcggaggcagcggacggccttgagcgcccgcgtaaagacgttaaggccgccaaccgaggtgacggtcgtgatggtgttgagaagtatgccgacgtagacgacgccgtcgagggcattccaaggcgagcggaggtagggcgagggtccaatgaagaggccgtcggcgacgatcttgatcaggagctcgattgtctgaggcatagtcgacgtcagcagcgcgtctgacgcactttgtgcgggcggagaacgtacaaagagcagagcaatgacgcagtcgacgacgtcgtaccagggccactcggcgatgctgtcagcgtcggggtcgtagcggtcccgtcggtaagcgggcgtcgcgacggcagccgtcacgacagacgccaggacggtcaagcccacacaggccttgagcgcaaaggtcgcggcgggcgaagccggccgaccgaagcttctgacgccgccggccggacacggaacgagccgctggcagagacgacgtaaagggttcgtttgccggacgaagaagagcgaacggtcccacgagggatagcgggtgatgaagcgcatcgtccgctcccgctcccgctggttggccttcgcgttctgctgatcgaccgttgcggtgcggctaggacgaaagacgcagttcagctgccggtcgatatgagtgatgatcaatgtgcgatgagggccgacctgaagtgcagaccagccgggggcgccaggtcgtccagcgcaaagctctgctcagcggccgacttgcggcgaagcacgcgccagaggtagtcgaccatgccctcctccacgggcgacacgagtaagccaaaatgggagggacggcccttcgcacagcaagaagcgcaaggttagcttcgaggacgaagcggtcgcagcggatatcggctgagcaactgacctgcgagcgaggatccgcctcatcgcggacgaccgccggctttgatggcaggacgagtgagggaggcagcttcgcggcgctggatgtagcagatgcagttgagaagaggcgtttaggctcaagtttgtcaagccatgacgtccgacgaggcgcggcgccggcggcgccgaggtggaactcgagttgtcgctcgcgctttgctgagtcggcagcaaccgaaaagttctccgatacgcaggcgacaaacctgaccagaatcaagcacgtcagcaagggtccggcctgttcctgcggctgcaggcgactgacatttgcagcatgacgactgcgcaggtagccgagagaggatcagcaggctgcggaaagaggaagctatgaggacctgggccggcgaacgcacagttgctgaagagaaacctgcaagcatgaaccggatcagctctgctcctgctgagccgtcaccgatagaaggacactcaccacgagcagagaaagagggccgacagcacgccttgccgaaagggccactccgcatccatcgcgttctgtagcctgcgcccggcgtcgcgaagagcgaatcagcgaaggaccgacatcggacgaggagaactttggcagacgcacgggtcggtccaattttccgaggtcatgacctgaaacatgccgagcagcgcgttgtagaggctatggaaggtgattagcgtctcgccgtcctcctcgatgtcgtcctgaaagagttggatggcctgcttgtcgcagagttcagggcaaaggacggcgtcagcgctccaggcgcaaatcgcggcctgtgagtgacagcagatgtacgaggatggctccaaggagagtattgaggccgagaaaggccgtcatgttgagcaggccaccgacctgaccgaagactgccagctgaggcgggtgagaggggagcatgagtaccaagtcggacagccccctgcgacgggcacgtacaagcaggggcttcatgcgaggcacgaccaggatgacgcggtaccaccgcgcgagcggaaagatagccagccagccgtacgcctcggaggatcggataactgggatctcgatgacgagcgagacgacggctaggatgaggtcgagccagttgcgtctctggtggaagaacgctcgacgatcgggcacggcagcgaagaagcggatcaccatctcgacggcaaaggcgcatgcgaagaccaagttgaggcgagctggtgcaaagaggcgatggagaggcgtcagcgcaacgagcagtactgagacttgatctggcgaagcacgaaccggtgagttgaaggtgtgcgtcagaggatccagcacagagagtcgcctgcgttgcgagcgaggcgacagcaagcgcgacccagaagaatcgagtcctttcatagaccatggacagcttccacggccgggcgatagaggcggccgcctgcgcaggagcggcagctgcgagactgagcttgccgccaaaagcgctccgccgagtctcggcgcggacgtcgtggaaggacgagacgatgattgcgatgccgagctgcgagagccagaagttgaggatgacgaggccgaggacgaagaagatagaggcggcgaagtagtcgctgtccatcatgtcaaacatgattggcgaccagccgttggccgacgagatgatgaagacctgaagcgccgagccgaggacgttgtcaaacgtctggccggtaacgagattctcgtcggcgacggcgcagatctgctgcggaggacaggtgaagcccttgacgcggccgactgcgccgccgagggggtcggccagcgacactgcgccgaggatgctgccgctcgccgagtcgtaccaggagccgcaagaccggccgaggtcggtcagattcgtcacgttcgcaggatcgactaggtgacacgatcggcggtatgagcctctgccggaaacgaagggtttgcgtcagcttctggcaagcaatcagagaaccgaagcggccacgcacgagaaggcctgaaccccgataattgagaagagtgctaaagcgaagaggaagagcaccaaggcgttggcaagtaaatgcgcagcgcgcttgagcgaatgcaggatggtgaccgtgcctgaggtgacgaggagcagcctgctcgcgcggaggatggagagggagcggaagatgaagaggtggaggccgttttgggtctcactctcggttagggcgaggctgagcatcgtccagaagcagaggatggcaaccgcgtcaacccggttccacgagtggcggaggtaaggccggccaagcagctgaatctgccgctcgtgcaggagcgaccgctggaagggcagctcgaccattctgaggatccgaacaagacgttctagacgcaagggtgcatgggtggccggcaaggattcggcgggtgagggcaccgggtaagcgatgagcgagactggcagggtcgaggcgagcttggaggcgatgaaggacggcgggacgctcttcaccccgcgccggcgacgtctgtcgcagagctttgacggcatcggcgggtttggagccgtcgagtccggcacgagcggcgtgattgagagagaatcgtcgtcgtcgctgctgtcgatcgatccgttgccctcgagctcccgtcggcgagcgttctcggacgcggtgccggtgagagccaggacggcccgtagactaaagacagccctccggaaggcgaccttggggtcgcgcttcggcgagtcgcttcctttggagtcggtcgatgccctcgcgctggagaccgccgagccgtcggcaatggtcccgtccactgcttccacgacgtcggccgcggcgatggctgtggcggtgtgagggtcgagcaacaggccggagacgacgatgcgcacggccgcctcaagggtgaagatgacgaagaggacgacgaggcagtagtcctcccagcgacggaaatagggcgcctcggcccgcgtaccgatcggtcgctcggcttggacgatgatgaggacgacgttggcgaggacgagcagtagaaggacggggtctgtcgctctgtcaggcgaacaacaagcagagtgtctgtgtcaggcacagtggctcggatgcggacgaacagcgaccaagacgtacgggtgatggaggacagcccagcatgccttgcgaaagcggttctcaggggagaagacgccgagactgttaccgacgagtgcacgcgagtccgcaggtgcggccgacgagagcgcctgcgcgccgccgcttttcaaagaggggttcaaaggcaggtcgcgcagcaggggaggcgctaggccggctgttcgcagccgaacactggcgtcggagtcggagtcgtcggcgtcgagcaggcgacgcggctggccgagcgagacctcgtcggccgccccggatttgttaaggtcggcgacgcggcgaatctgtcgagatacagcacggaagacagccgcgctttgttcaacgatgggcgacgtcgggctggagggtgtagcaggccgccgccagccgtgcgacgacgacgacggcagccgcagcgacgaggaggcgcctgcgcggccggtgaggtgggcccggtccgtctcgccactcaagctcgtcgagtcgtccgagcccgcatcatccgactcgctcatgacggacgagacgccctggcaggagcggtccagagtgtccgacgacaactgagggctagggagcgcgacggagccgaacgaccgccgccgggatgacaagggcgagctcggctgcgacgacatcatgcgcggccgactggtcaaccagacagagccgcaacctcgtcagccgggatgctcgggttcccccagcctgacactcgagaacgtaccgcagcctcagagaaaggtgagggttagcagccagcgagccgactcgtcacccattccagctcgaggagccaggcgggccagctgcggcgtcgcgcgagacgacccgacggccgacctggtccgtcgagatggcctccacatgccgcacaggtccgttcggcgccagtgttggttgaggagagagcgggcatccgatagatgcaatgtgggcagccgtcatcagcagcgaggggacaggacgggaggcatctcgagcaagagaagacaaggtctgcggctgggaagaggcccgccggtcgagctgccgtcgtgtcgcgcgcgcgcgcgcgcgcgcgcggggagctctttgccatcgtcgccgagctcctgcagctgcggcccctgaccctcactctcacccgccccatagctgccaagatgtctgctgagaaagacccgttctacctgaggtccgtccctggaagcctgctgttgctcgcgcaaaacctgacgctgaccctccatggcttgcgcgagcaggtactagtgcgtgctccgccctaagctgcagctgctgccaacaaccgcccgggctcggggccggctctggctcgagtagctgctcgaaggccactgccgccttgcattgctgggagaagggcctgaccgcggctctcctgatctgtttctgcagcaccggccacattggcctgcacggtcatgagttcctcgagttcgagtactcggccggccgattgcgctacgccaacaactcgaactatcggaacgacagcctgatcaagaaggagagtgagtacccttcccttgccggccagcttatggccttctggattccgccggctcgaagctcggcgtgctgatcagagtcctgctccgtttgcctactgcccagtgtacatcagcccgctgatgatctctgaactgaagcggatggtcgagtcgtcagacatcgtcaagtgcgtcgaccacagctcgtccgaatgtgccctggagctcgctgacgatcgctttcaccgcccgcgcatctcggcccgcagggaggacgacgccaagtggccaaagaagaatgctcagggcaagcaggagctcgagattcgggtcggctcgcaacacgtgtcgttcgaggtccatcacctcgtggccgaagcatcctggccaccgatcccttcagctgaccatcatgggttgcctttcattcgcagacgtcgaaaatcggttcgctggtggacgtccaggactcggacgatccggagggtatgcgcgtgttctactacctggtgcaggacctcaaagtcagccccctcctccatcgaacagccagtctcttgcctgtgcaggatgaaaagctgacctgagctacatctgcgaccgctgcagtgcctaatcttctccctaatcggcctgcacttcaagatcaagccgagtaagttgcatgcaggacgctcacagctggcgaatgctgaccgcttgtgcctccccccccctcctttccagtcaactgatcgcggccgatcagccgatagagaggagctttctgagatgacattcccattgtacaaaatccgcgcctggggcggcgctcggctcgccctctccctcgtcaccggccgcccatgccgccgcctcctccgacggtgccggtaaagtgagcgtcggttccgacccagacgctcatgaggacgtaggcctcgctcaggagcatccgcacctcggcgtccgtccagtcctgcgtcggcaggttctgcaggtacatgatgatctcctggagttggcggccaatgaagcgtgcgaggggctttcagtgccggcagcttcgaccaagcaagggcaagagacgcacctgaaaatccttctcgcgaagctcggcgctccacttgacgaggaaggccgagcagacgtagaggtggaattgcgaaaaggcgctgatgccctccgtctgcagccgtcaagaagagggatcagcggagagcaggacgagcgaacaaccagaggtgcgagagacgtaccaggtaggtatcccacatgcggacgacgcacggcatcgacagctcgcgcatgagcaggcaattcatccaccggaaggcaaactgcatgaactcgaccccttggtcctcgaggtggttggcaagtagcgctggcagcggagcaggtcaaagaaaaggtcagcgcgggcagctacactaagccgcaacctcttgcacgcacgatcgattcgcgcgacgagctcggccatcttacggacggagcgaacgatgccgggctgggcgacaatgtagtagtcgtgcacgcccgagagcatcctgtcgaggcaccagaacgagtccgcctcgacggccgagagggcgtgctctggcaggagcgacacgtcgaacgtctctggatcgacatctggaaagaggagaggcgctcagtcagtgagaggtgcaccagactagcgggaggaggatgggcccgactaatgtaggccgcaagaaacgtctgaaagaagggaatgacgagatcattgatgccctggacgtaacccgagtctggatgcttggtcgcccagacgtaaaggatacgctctagcgcctggagcggcaagtgggaagggtcgcagagcgtgtcagggtcaagtagcacggaaagggcctgcctgaatcggcaatgaacgcactcgctgtgccggcttcatcgtccatagcggcacgtttggccgtgtccgcggaatatcaatcgtgatctgatgccacatcttgcagtcggaggaggcagggcgaggaagggccatcagtaacgggttagtggcgcgaagggcagccgctcgcgacgcaccgcctgatccagcccttccgtcccgcccttgaaggccgtgttgacgagatcaaggtaggcctgccgcttcagcgagagtacagtatgcctcgatgctgacgttgaagggaggtagtcctggcgagagccaagaatgccgtcagtctggcgcagaaaggggtatgggtcggatcgcttgagacccacaagcagaagttgccagacgatgggcctcagctcgtccggcacgccgttccacgcgagccccttgagctcgaccatgttgatctcgcgctcggccgcgagcgcctttcggaagcgcgagatcttgcggtcggtccttgtcgagtgcgcccggcggagagcccctcggcgcgtccgggcggtcgtcgggttccggacgctcggcgacggtggctcagagtcgcgggacgagtcgagatagccttgcgtgctggtcgatggcctcagggccgatatcgggtctgcaacgagttgaagcagtgcgtcaggaacagcgcagacacctgctcaggtggtcagagcacgcgcaccaagtaggatctcctcgagctcctccttgacgaccggcccctcctcctcctcctcggcctccgactcgtcgtcatcatcgtcgtcggggccaccaagagcgtcgcccgtccctagcgagacgtaggcgagctcctgagcttcgagcggcacctcggccgccgccggcgctggcggcttgtccttggccttgctgccgctccggtacggcagccaggacgacgacgtcgacgagcccgaggctgacctcgtcggcgccggcggtagcttcggtgcagactggttgtgcggcgagagcgagctccggtcggttgtcggcacgccggcagaggacgacgtgctgcttcggatgggtggcctcggaggggcggcggccgacggcggtgatgatgagctggccaggcctaggctgcctgcgaacgattgggaggacgaccgcaagcctggccgagtcgaggaggtcgagactggtcctgctgctgctgctggaggacgtttgatgccttctcgtggaggatcctcgctgtcgctcgacgagtcccagacgtcgtcctcgccccagctcggcgagctcgtccggccgagcgagagggccgagagcgaggctccgaagccgccaagcgaagaccggccgttgcgagacatgggcggcgggcggctccgatagcaagcgaggggatgaagaggatgcagtcgaaggttgaggggtgcgagagatggttgggtcggagggagtgtcagggtccctcttttataccactttgacatctataaaagggcacaaaatctgatcagacgaaaacgccctccttcctagactctctccttccaaatgtctgcaacatgtctgcaacatgaaaaagagttgtcatcgatctccgtctagaataaacgtcgactctaaacgcaggcgaccatagcgaccctaacccaacctcccgacctaccctaaccctacacatcctcacgagattcggaaagaggcagcctctgtagcgaacatggcgctgcctagcaagagtttcactctttcgacccacgcccgttgcccaccgccgttctttgtttgaagcgtcgactaacggtgtgacaacaaggaaagtgcaaattcgacctcgagggctctgaaggatcccagcgggttcaggacctcggctggaggatgattgccggccaaatcaggagaccagccccttgaggaagggacgtgtcgcaactctggccctcgactcctcgcccaacacgcccacctcatcggcttcacacccgcaacagcctggagctacgtctctcggatcttaccctagtaatcgcttcaacgtagcaggctcgagccgacgacaccttttgtgagcaggccaatttgtcggccgaccgtcagctcgcaactgacgccttgactctaccttcgcccgacaggctcttcaagcgtatctcatgcaaggcgaccgttcctcatccgcaccgccgtgcccaatcaatcgtgagcgacgatcgtcagctttagctgatgcacgctcaggtcaacagacccggctgcagctgaccagccaacgtggccctcccccccccgatctccccggtgaaggctgacgggccggccagctctcgtgtcccatcgctcgctattgaagcgcatgatcccccgcctccgcaactttgatgtcacctgaggtgtgtattccacatctccgagtcagccagccggccagcgcccggcttcttcccggcagtctgacgttgacctcttccagccgtcggaccactccagcccagcatctgatgactgcctttctccttcgcgccgacacacatcgatcaaccggcgctcgaccttcgtccgcggccgtctccctgctggcctctatattcgacccgacgtccaatgcttggtccgactcagctgcgggacccattaacggtcctgtccgtcgcaacacctgaccagcgtttcccgagcaagcggcgcacttcgcgcttttctcacagctggagcgcacgtctcgcatcggcacaggtgaacgccgcgatccgttgcaacaaaacgcgcggttgcgccgttggcgtgcagctgacactcccaccgctgacgtgacctcctcgcgttgccttctgttcctctctgcctgctgacgacgacgactcgcgccctccgcaaaggcgccgaccctcgctgttgaccatgcgccttgcacctgctgcagcgaaggtggacggaactgggaacgagcagtacataaatacgagcacgctcgtgtagggtctacatgtctcgacgaggagaggagaggaaaggggacggatacggatggcaagcagcggcaagcaaaacgtcggtggtgatggcggaggaggactctcgagcagcgcgcggacgactagccaagtttcacgagaactgcgtaaaagggaggcaacgtcagtgaggcgcaacagatgggggacaggacgaaggccgcaccttccatcggttgttgcagtgcaagcacgtcacgaaggtctacgatgacagaggcaggcaacgcaatggtcaatcaaggcgtaaaggcaactgcgccgcgtaagcgagactggcgcactgtcatcggctcgtccgcgctgcgcgtctgcatttggtagtaggtcgtcttgcgatggccgcacttgccgcacttgaactggtcggtctcggcctgaaaagcgtagaggcaggagccaagccgcttaaggtcagagctccacagcaggcaagaccgctcgaaggacgtactgcaatctcgaccgctccacgcgagttgaagaggttctcggtctcaagctgcttgtttagggcctgcaggttctcactcgccatgtcctgccgtacgggtgcaaacggggtcaggctcagcctcagcgaacccgggcggcctcgtcgcgccaacgagggaggaggccacgcacctccttcgacatgttgcagatgtctatcgcagaaatctcgccgcggacgatgccgtcccggagagccgggttcgtcttgtccttgaggttgaggatgacgccccgaatcttgctccggtacgcgtcgtctgtcttggtcccgacggcgttgtagaagcccttctctaccagcttggccttctcgagcaaaaccgcccggtcggcacgcgagtcgcccgcgagcgaggtgtagatgagctcaaccgacttgtcccggatcgagtcgcccgtgccggcgttggctgccttatccgacgcatacgtccgcaccttgagggggtaaggcaggacgatggtcggcagcgccggattgacctctgatgcttctgacggcccgtcgtcagccgactcggtcttagcctccttcttggccgaggtcgctgtcgaagacgacggcttgccatcttgcgtcgacgcgtcagtcttcgtcggcaaaggagcgacaggtcgtgccgagctatcagaggtcgaagaatcggtccgcttcatggacgccgtgaccttctttgggctcgcagagcctgaaggggtagcaagtaggcgtcttgcgtcagcggaggacgctctcggaaggaggtcgcagcttgcccgcgagcggcggctacagcgacgcacctgatgcctcgcctttcgccttcttcttcgcgctctcctcgccgtcctgcgactcggccttgcgcttcttgctctcctcgacggcctctttccatttgcgaacgatcgacttggcgaggtcagagatgtcgctggtcgtcggtcgcgcgagcgtcagcttgaggatcagccggcctggccccaactctgccgctgctcggtccatcagacgtacacgttgtcgtgagtgcgcagcttgccgaccgcgacgccggctttcgtcgcctagatgggaaggaggtagcgcggtgcatgagctcaaggaacggcagcacaggcacgtaggttgcgggagcagctgcggcacgcaccctcaacatctcctctcctggctcgacgacctccttcaacgtccggagctcctcgaggatgacctggagcaggcgtccgggagcggcctcgcgggcgtcagtctcgggcaggcggggatggagaggacgagccgacgcacggcctcatcttcggccttgacggccgcgaggagggccgagacgtgcttcttgatgtcggcgaccgatgccatcagagctgctttgttaccgagtcgagaatctggaccgtcctggggctgggcgcgcactggctgtaaaggcagaagggggcgaggctgaggtccttggctcggaaggagggggtcgtcgttcgagggcagggaagccggtgcgaagggccgaggtcggtcttgcagcaccgacggccatccctgccaccctggtctcccagcccttccttctctctgacagagctcgcccggccgtccggtcactggtcagcaacgccgagagcccagggcagcgccctcgagactccttcggaaacgacgttcgccgctcggtaccaacaggcggcggagggcccgaccgggtacccctcgccgccgagcccaccgaccgatctcgctcggtcgaccgcctacggcgcacggatgccagcctacaacgctgctctcggagcggacgggcttggtccggctggtctttctctcgcccgtccggcggccgtcccgaccgaggtgctgctccacgagctgcccgacatgacagccggctcgctcattccgctcgccgaggttgtcgacgcctgcgtcaacgagatctacaagcgcctcgtcgagctccaggacgtcctgccgtcccggcacgagaaggctcgtgctcgagatgtcttccagtttgccctttgggccagacgagagtgcgtgcggctcctggcggtcgtccgttggtgccgcgagggcccagctgtcaccaaggccttggtgcgtcctgcttcttcccctcgtcatgctcccccgaccaggcgttgtgattcgctgtcaacttgagctgaagcgatctcgccgagcatcaacagaacgtgatcgagttcttgcaacgccagaacgcccagttcgggacggccatcgacgagctcgccggcgttcgcactggcctgagcggtactcggtgcgtcaacgaacgctttcgtcctccccagcggcccttgggagactcgtcgctgatgcttgtacaacgttaggctccgaaatccggacatcctgactgcacttgacgtcctcacgaccggcaactatcagcgcctgccgacccggcaccaggtgcgtctctctctcactgagtagctcctctcgcgatcggccctgaccttggctctacttttgcagactgactaccagccggtcaaagccatcagcgacagcgatgttcagctcgtcttgcgccagctcgacgaagcgattcgtcaccgcctgcgcttggtcgaggttgtcccggcagagatggggtcgtaccgaatcggttcgtctcaagcgacgcctcgcctcttcaatggccaggtcgcaggctgaacatctccctgcccctgcgtctatcttagccgacggccgtgtctactttcactgccagggcctcttcaaggcggccttctcgctgaccggcgtccaggaggacgatgcggagccgccagacgagccgcgccaaggtctggcccgcggtgggacatggtacctcctcgacctcgagtgggactacggcattggtggtagagaaggcgtcgaggacctacaacgaggtcagttctcttcctggtgctctgtcggggattcgtccgcgcccgcccgctgcctgacacgcgtcccccgctcgtcgcagattttccgacgacgcctccgaagcctgtctttgaggagattgcccatcactgcaagctccagctcacgcccccgccgaccgtatcgccggctactgtcaacgttggcttggaaccttcggccgatcagtcaacgggcggccccgctcagcaggccacgcccgccggcggcagcccctacgtcaaaatgcactcgccggtcagcatcgacatcaagctcgagactggctcggtaaccggcggcttccgagcggccggccaggcgaatgacgagcctgagcaagaagttatcgatgctccgctcgtccgagcgtacaacctgctcggtgggtgctatttcgactcaagcttgtctgcagtcctacagtcgtgactgacaccgcccgcgcctcccttcacagagtcgctgggcctcacctttcagctcgagatcctgcacgcgcaggcggtccgcatgcagcagctcggctgggctcactgctttgccctcgagcttagccgcgatcggcggtcattcaagatcgcctactggccgtgagtctcagctcgcttggcctccgttgcgtttgccatgcagaggctggaacctttcgcccttgccttttttccagtcgtcagcgctctccgcggattgtcggcgctccgtcgccgccatccatggcgggcactgtgaccatcagcatcgactccgcatctgtagcatggccatcggcaggtggcagcattctgcgaagaacgctgaatgaggtcgaaatttcgctcaaagagtcgatcctgcgcgacggggacgcggccggcagtccctcggtcgccaggattagcgacagggtgctcgccagctcgttacgagccgactgggagatcgaacgacgatggagcggtggcctggaggtctcgatcggtctgacccaaaagcaggtgcacgtcgtacgtctctagccggccctgctttgacgaccggaagcggtctggcgctgatcctcatcccttctggctcgtgcgttaggacccgcatcaactcgatatggagagcgtgctgttcggcgctcttcggacgcatgccaacgcgctcgtcaaagcctttcaccgcagagcgctcgagcatgcgccgatggcggccgtctacgacctagacggaggcgacgtgcagctcgtcgaggagggtatgtccggccatagcggccgttcgtcgacgtataggaagctgacggccgctcttgtctctccctgcactctcgcagagcccgacctgtgggtcatgcagattcgacttcatggcgcgcagtacgtctcggtctttgtcgacccgcgctcgggtcggatcgtcctccgcgacaagaacgagatcttcagcgcgtcgggcgagtcgcgtttgatgatgtcgatgcggatggtcaacgacaacccggccgtcttcaatgacgttctcgttcgactcaagctctcggtacgtctctgttgtcgctacctcgcttctcactcacttggctgactcgtctcgatgcgtttgtgcagtgcacgtccgacgcagccgagcagcggctcgtctacacggcgccaaagctcacgacgccagcctcgcggcggcggaagacggcgatggctctccactcgtcgctgctcgcaaggtacgaccgccttcgactcgcaacgcctgcggccccaggcctgcggatccttctctggacaaagtcgatcggcgactactgtttcgtctatcagctcggcgagcgacggtcagtctcgcttaagcacagcacatccttgatttcgctgacgagttctgtctgcgacacgcctccccttagacacgggctcactttcaagctgctgccaggaacggcgacccgccggtacctcgttgcagacgcatcaactatgtcgtccagccagccgttcggaacgtactcagtgctggatccagccggccagcccgcactctcgccgaccgcgctgctgcctcctctggccagtgccttgacgcctgtcgacccttcaagccgtctgcgcttctggcctatcccgaacctctcagcggcatttcggcagacacttgcgaccgtctgtgttcggcagccggtcgcccgggcgctcgtcgagcagcggaagcgcgaccggcgaactgcgcccatcgtcgtcctcgacgcccgacgggccgtctgcgagctgccctttggcccggagatgctcgaggagctcgaccaggtcgtcctcgacgcgctgctggccccactcgccccacttgccggccagcagacggggtcatcaagctcacagtcaccggtcgctactcctgtagagggtccttctgtcgccgcctgagaggagagagagagagaaagatgctgtgtagcgcacctagacacgaccagtggccaacaatttatgactgtcccgatccaaaccttcttgctatgctgcccgacgacagaattgctcttgcgcctttgggtctgctcactaaagggaggtctgagcggtgtaagcgcgcgctggcctaaggccaagcggtcgtcaagcagtgcatgcaggaggacgctaccggctgagtggccaggacgcgacggaaattgtggtggcggaggcgggaaacaggccgaaagggagacaaacacaactcgggtcgtgagttgagtgaggattgtaagaagagcaggtcgaggcgagaagggaatagggtggtgcgtcgactggaccgggccggccgaggagggagagagataggaggaagttgcaaaagcggtcgtcgttgcggaatggcgggtcgtgcatcgctctgctgttgtcgctcgagccgaaagacgtgcgattgaggaagggtgtcgagacgagggggagggtgttgcggacgagagaagagaggtgatgggaaggcgggctgctgcgcgcgcgccaccgcaaagtgcaggtgcaagtcgccctctctccgactggcccgcgctgccagcacgagcccgctctggccctcaacccgcccgacggccacctcgcctcccctgcacccgaacgccttgacctcctcatccccctcgtcaaccgatcttccctgcccgcatctaggagagggctcgtgcgttcactcttcctgacacgtttcagctcgcttgcttctcgccctgacactcgcattctcggccctttttttcctgacccgccctttcatcggacctcgcgcacagaccctctcccaccctcctccagcgccgccggcgagcctttgatgagcccgctagcactggcggaggccttgccgcctccgctgccggaccctccaccggtagaaaccgagccgtatacgggcgacggctgtccgcctggcgtcgatccgacgacgtgctgcgtctgctcggaccacacgcagttcgaagacccgtcgcacccgcaccaccacaagtttaacgaccgggcgctcgccgacgagctgctcgagtacctaattgagaaggagcgcgcgctcgatgtcgagagggccgagctcggcgccgatgaggccgatgaggacggcatcgacgaggcgcttggcgccctcggcgacgacgaggacgacgacgccgacgatgaagacggcagcctggcggacgagatcgcccgccgcgttgttcggccattgcctcgcactggccgccggccgaccgtctccacttcgacgcagaacgtcgacgataagagcgacgcgggcgacaccgagactggcgatgacagctcagaggaggacgaggaggaggacgaggaggaggacgagagcgggagcgagccgtcatcgtcgcccgagtcgccgacgctcgcccagatgacgcgcggcccaccgccgacactccagctcggccagaagtgggtcatccggcgcgcgccgcccaatgtcggccagccctcggtcgggacggctgtcggcgcagagtttgacagcaaaggtcggctcaagctcggcggcctgagtgtcacttctcgctttcctcaacggcagcagcaggagcaccgtcagagcgagatcaccgctggcatcgccgccctcagcgtcgctgagcagcgcagcacggttgctgaagaacgcgaccgcgtgcgcgaagaggagccgcgcagcgatgggtcagtcgtctttctcagcatctacgtccttttcgcccgtctgactcgtgccctctcaaacagcttccacttcacctcgtctaacctctcgaaaaagtgcgtcctgctgctctgtcatcttgtctcttgcctttctatctgctgacacctgacccgcggcttacaggcgcaagatcccgactccttttgccggcgaccactcgccgactggccgcgcatcgcccttgtcccagctgcccgagacgctcccgccgacgtcgtttgatccggccggcggcctccagacgatgtcgtcgtatctctttccgtcattcccggcactcccgatcggctacacgcgccagatcccgccgctgcctttctcactccggacgcggctcgtcctcgcccgcgtctcgccctcgtgccgggccaatatttgggccaaggctatctgggctgagcgcaaggcgatcattggccggcacggccctcacaagctgacggacgacgaggcctgggccgtcgactttgccggcgtcggctggggcaaaggtcttctgtccgaggccgtcgacgccgcccaccccaagttccgcaaggaggactcgcggcgtgccaagcgcggcggcatgcgtggcgtccagcagaagctcagcaaggacggcctcagcctttacgccgtcgtccgcgaggaggccgattggacgagcagcgtcaagaagacggcccgaatgccggtgcctgagtggctcgacaaatttacgttcaccttcacggccgagagcgagggtgcgtccgcttctagccgctgctcgcacggcacgagggctgacgagactctctttccctcagcctcggtgaccgcggccaagatctctcgcacgctgctcgcgcttcgcctccggctccggctcgcacctacgccgcgcgcagacgtgcctgccatcagtctcgacgaggtgactggcatgtcggacctcccgccgcgggcgtcgtcgtacagcggcatcacgctcgctcacccggccagcggtcccgccggcgacggcggccagaagaaggagaagaaggtctgcctccggcgcgcggcggacgccaagaagaagggcggtgaagccaaggcagccgggtccatcgacgagccgagcagcctcgctccggccgccgtcgagggagggcagcccaagaagctgagctcttcggccaagaaggccgcccggaagaaggcagctgctgccgcggctgcggccgctgcggccgctgatggcgttcctacaccgctgcctccgatggagcgcacgccgatcaacgcacccagcatctcgctcgccggtctttcgctggagccgaccttctccccgccgcccctgctgccgccaacgggcgcaaagaagaaggccaagaagaagcggagtgcgctcgccaacaacagcaacccgcaccacatgaagaactgtgcgtcctgtcgcccgctgcctcgactcggcgccccttacctgactgacttccttgccgccgcccacgcagacgtcccgacccggctcgtttcggatcagcctagccaggttttcaacccgcacgcctttatggcttcgctctttttcccgccgccgacgcgtttcctgacggccgtcccggccaagctcaaggccgcggcggctgctgctcctccgtctgctccggctgctgctgcgggcgacgatggcgccccggcgccgggcacggacgagtacatgtgtgtcttctgcgagtacacgctgctctacggcgactcgccggcggcgcggcgcaagctcatttcgaagcgcaagaagctcctcgcccgcaaggagcgcgcgcgcgagcgggcgagcggcgtcgctaatggcaccaagacgtttgcgtctggcaccggcggcggctcaaagcagattcgcaagacggagcaggacgacgaggacgcgtacgagggcggtgaggactgggagtgcgacgacgagatcctcccgaacggccagtgccggtgcgttctttcggcacgactcctcgtcgatgggcactggctgacctgccgcaatttgaacaggcgctgctccgagcgccgcgctcatgagctcgaccgcaagcacaagaagaacaagaaggtgcgtggccccatcgtcagcctcgattagctaatcctttgctgatcgcatctctcctcttgcttctcagaagaaaaaaccgcacgagaaggcccccggttcgaccgaccccgccggccctgctgccgacgtatcggttgcccttgcgtagcggcttcttctcgtacacctttctcggctctctgtctcgcttctctgtctcgtttgcctcgattcttgcctgtctccctcacgacactctcccaacgacacatccgtctccaccacgacctttttcacgccgcctgcttttcctgccttgcattccgttctctgtttcttgccggctcccactttacgaacgcctccctctcagtcacgactttcctacacaaacccgcatccttctctcttcttgcatagcgaccgcgtcacctcgagccctgtccttctgccttccttccctcttcacatgctgctaccccccccccccggcgcgagctgagcatgggaagcgcgaaagaaacgttcagacgcgcagacgggagagaggcccgaccgacgggcgcgcctggggccggcgcgatgccgcagcacgacgacggggaggccacctttattgtttgtccagtgggttctctgcagtcagtcaggctctggagaagcattcgggatctcttttgaccagcaccaaggactggcagctgacctgtcgactgcttgtggtgagagggcagataggtatcaagatctcaaaggcggctcgggccggcgttcgcaccctccctctcgaccaccacctcgtcctgaccctcccggcggcctgtcgtagccatcttacactcaaactacctcaagctgtacgtcgctgcctgcccgagctcgcctgcagcagcattttgtgaggcctgcccgaaaagacgccggcagcggctgatgagctccgcatcgtcctgcgctttgcctgccttcgccggacgcgccgccctccttagcttccactagccattctgcggaagacgacctcttcaaccctccaagccttccttccgtcacgatgtgcgccggctgatgcgaacgcgctcgcaactggcgttctgtctgaccctttgcctttgcacgattcgccaaacaggccgatcccagatctcccgctcgagatccagctcggcatcctccgccaggcggccgccgacctgctgatccaagagctcgactacccggaggacctccggacccggatggactttcttgcaaagtgcacaaaggtgtctgacgactggacggttcgtcggctgcctcgctcctatcaccgcacctgagccgaactgaccctcctcaccctgcttcgctccagcccgaaatcatcaggctcatgtatgtcgatgtctctccggacaattttccgggcaggctgtttggtcgtgcgctcgacaccattaaagccgacccgtttctcggcacctacgtcaagcggatcgagaaccccggccggcggtgggacaacaccagccgcatcctcaacctcctgccgctccttccgaacgtcaagactgtccgcggcctcatctgggacaacgtcaagatgccggctaagcgccgcaagttcaaactcaagccgcacttcctctcggtctctgtccaactgacggcgccgacggctcggctcggcgacttcttcgacctgagcggactcaaccgcttcggcctccacgttatgtcgccctggctcgattatgcgccactcctccgcgaggtgccccggcacgtccacgagtgggagatgtcgtccgacaccctcgacggcctccagggcctcctcagctcgatcgccgaccgggccggcgtccgcgtcctacacctcgttgccaccgacgcagccgatgctacgccgtccagcaggctgaagacgctttcgccaaatccgcttcagctttttcccgagcttcgcttcctccgcctccggtgcttcgacccgacctcggtcatctccactgcgcacagcaagctcacctacctcacgctcggcccgctcgcctgcgagtacaccgcgccgctcgagcccgaggaccggtacgacagcccgtccgaggacgaaggtgacgaggaggaggtccccctccaggcgaaggggaagggccgatcggtcaaggccgaaccgatcgaggccggcttggacgacgccgactacgacgacgacgtattggacccccttgacggtggcggctacagcagcaacgacggtgacgccgaggatgaggcggactctgacgacgctccgggcccgagcgctcggagcgtccggcgcaccgcccgtgcgccagcctggtctacccctaagtcgacgggaaccgacgacgacagcggcgacgacgacgacagcgaggacgacgactgcaaagccgtgcccgacgccgaggctaagccgctgtacctgaggcgggccggtatccccgacgcctggggccagcacatgtctgccgaggcgaccggctttggtcccgatgcgccgattcgtgtcgccgcctggcgcgtcgcccgcatccaccgagctgcgcctaaccagttcccttcgctcgtcggcgtcggttttattcctggccaaggcctcctgctctcgttcgaggcctgggctcggcgccggctcgagggcgtccggccgatggcacgcgctctccaggcggccaacctcacactgctcgaccaggacggtgagatctggcaggacgtgtggtttgacgaaatggagcctcgggacggtcagtttatgtctcccgtcgctcgttgaacgaggtttgcacgtcctgacgccaacctcacttcccgctcaacaggaccgttcgcctgatcacccctggacatttcacgaacactacattcaaccccgcctcttcctattatcccccactccgttgtccgcctcgtccccttttgggcccatcgtcttttggtcttgcgtctggcgccgtgtaaatttggcgccagctcgccgttctctcttcgccgcggctctccgccttctcctcattgtcctcaccgtgtaatttgattacatgccgtctttgtagacaacagagcggtttgactacgagaagggttggagagactaagttcaagctgctctcggtgagctagataagaaactgctgcgccttgcactagccaggcgagcttccttaggcgtggcaaacgcagcttttaaacggcgtctagcatcctctcaagtgattcagtggccaacttatcgagcgctgaaggcgagaggttttcaaaatgacccgggactgcacgggaaatggcctctctagctcgcgccacaaagccacgcgtccaggccggcagcatacgacgcctcgtgaacatcggcacatccccccaaccccttcctgaccctccccctcaaagctgcccaataagccacgcatgcagccggccatacacaacgtccgccaccgttcgcttgtggcccgacgagggctcgaggccggccgaggtgcgatcgagggcgaggatgaggaaggagggggtctgggcgagagggagaacttggcgtcctcacacacgtttgacctgcttatccttcgttctcgagctgaagaggaacaagctaggctagacttggtaaccgctaggcggctgcctcaacaacgtcgtaccgtagcggtcgtgttcgcaaagaagcagctgcagcgctgcgaagcgcaaggcttaggaagcagactcgccttcaggattcgactcgtcgaggttaatgccacgttttgtcgcagagttatgtgcggtgcaaacgatgcgggtgctgatttgatctgtcttcaggcggagcatcgggaaaaagcggaaggctggaggcggccgcgagggtgctgtgagggcgatgagctgatgagtatgacgcggtactgaccttgatgacagcagaacttcggctgggtggcgcgggtgtcgaccgaaaccgacgtacgacggggtatggccggtcgcggcggctggcatgttttcgagggcgaacagcacgacgagatacacctcatgaacacattgaagactccgggcaagcatgtgcgagacgtcaacgctcgtagtcgcaaccgaaataagtgtcaatttatagcgaaatacgtccgtggaagccgaagaagaatatccggtcgtttaagcactgcgtcggccccggggccagctcaaaactggtttctgccagggtttcctccgcgacctcctgcagatggcgccgacctcaattcagaccaaaaccaccatcgactttctcggcaccgccctgagcctgcgacgaggtgccgcaccagcaggaagtcgaccttgtcgaggccgtcgatcattccttagcattcaaatgctgaagctcggccgcaagattaggggtcagctattgaaatcacgaggccttgcgccggagagattacaaggagagtgggcgccgacaaggctgaaagcaacgtcatgacaggggaaatggacggtgactcggcttaatctgcattctccagtccagacaatcccaattctcctgaagtcccatggcaacgtaagcccagtaaatggctacaaaggatttgggagagttcaagttcaaatcagcctgaacggaagaaaggaggagtggagagagctaaggcgccggaggatggcagtgtgggagccagcatcgaaacgcagcgccgaagccgcattgagtggcgtttgctgatcgagtcgcggcccgcacagtacgttggcagcgaataatgccgtggacagtacagcgtctttccatgtagacaacaaatgacggcatggctcatgctgatagcagacggtggatcgagaagttctagcagacggcggatcgaaatccactcgtagtgcacccggcctaccgagccttttgtttttacttgtccccttctctcgactacttggcgtgtcgatatcctcctacaggccggcagactacagccgcaccatcctggcgttcgctaactacgttagcaacggccgcaagctcgatgcgccgatggagtacgctatggtgagcgcgtcgccttgtcctcacccccccccccttatggtcaacgttgacgcccctccctctgcccttccgaatcccgttcaggatgcggaccggtgggcctcgcgcgtcatctacgtctaagtcgtctcgtcctggatctcctgcatgacaatgatgcgagtccgcacatcgcacgacagcctgagccatgaaggcctcgagtaggtggtcgagggagtaaaactggttccaactcggagaagttggcgaacagccggtttgtcaccgtagcaacctcgtcaaggacgcccagtaagggacgagttgaatcgtctagtcgttgtgtacgtcgtcgggctcaagtcggccagcgatgtcggtctggatgagagcgcggtgccggacgctcgagaggaagagcgagatccggttggtccataacgtcccagatcgagtgaactgacttggcggctttgtcaacataggaaagggccagcgtgttgacattgtcaacggcgattatccattagactcccggggcctgagggcgattggctcgcacgccctgccgatcggaagcacttgtcgaaagatcctgaagggacttatggtcgacgttaaaagctggccgtgggctggcgcacggtagctaggtcagaatcaagctgaggccgcaaggcacgacttgaaagcgacaactgcgtcaccatttaggatcatgacgtcgcacatggccgggtcctcaagccaggcaaacatgtgttctcgccggcagatcagggtagctggaacattgaaggggcgcgtcagtgctgtgtgcagcggttcttctgtggcgcagggcgtcgcgacgggtttcgtttgtccgaagcattcggcgggatcgatcgggcagtaaccgttgagctgcagcagacccttgatttcgtttcttttacatcgcctcctttgacccccttttactctcacctggccctgggctaatgtgcggtacgtatgctcatggttggtgccgagtttgatgtgcaacggatcaggagcggcaggagcgccgtcgaagcgtctgaccaaggcttctgaagtacgtctttatattgtctggacgccaacgtctcgctcaagcgctttcaaagcatggacgtaagcgactgccatccggaagaatcagatcttccttacagagcctctcatgactcgcaccgtcgttcaacaggagctctacccagagaggaccacacgattcaaatctggaccgctaacaaagcgtcgtagagctaatggcacgttgaccgattgcggatgggacgtgcttgaccgttccggaatcgcgtcgtctacttcacagtccctctcctcatcgtcgacgatctccagtcagcgaagcggcgcgcaacccgcggacggaggggttctttttttcacgttgaagtggacacaacgagcaccatccgccgtgtcgccgacatcacatggattgtattgtgttgaccactcaccatcaaatcgttgtggtgaagtggtattcattggtgcttgccatctggcaatctgcactaggccggggttcgattccccgcggcgataatctttttgtcactgaccttagtcaatctcaaattcgtcattagcggccctgcagggtgtggtgttatgatcggatagcgacatcgcttgcgaggagagtcaaatgagctgtacataatcagcacgggcgctcgtcgtcgcgtgcgacgccgacggaaacgcttggctgaagctggtcaacctggggtgaataaaaagctgcgcttgataaaggcagagccggtgcagttgtggaacccagacgaatgctggcggaatcgcgatcttgaccaggtcgctggcggcgcctcttgcgatgcgctcggacctccgtctgagactcttgggcaagccgcagaggcttctcctgctctccatcactgccagaggctctgaggaggcggtgttggccccggttggtctataccacggtgagagatgggagccgtcattcgagccgtagcgggacgaacgcgtgactgatggatgcagccgtccatcgccgttcagcttgaccgccggatgaagaggattagagttcaagtcaccaagcgcctgctgagctatagaaagggaggcgatctcgggctacggcccagacgcgccgccgccctactttcccgtacacctactggcgctcttcacgtcttcatcttttcgaactccgacagcagacgccatgctcgacaaggcggccgcggtcccattgagcactttgagactgctgaagtaacgcagcagattttctccaatctctcactgctcaatgttgccaaattatcgtcaacatctgccgatggtggggacaacatctagtgtcgttcttgtcgaagggttgccgccgccctcgtcagccgtctgccagtgccgcggtttttgcgcatgacggcctccggcctccggctggctggctgacgaaagcaggcaggatgtcggccgaagaaaggaccacaggcggccgtcgctgatcgcggctgcgccgaatcgggagttgttgcctttacaaccccggtcacttatgtcttgaagcccgtccagacaacgtggaagcaaactttgtgctcggacatatcgtctaggtcgagttgatgctcgattgcgtccttcttgattaccgaaataagcgttcggctcgcggctgcgatgctgaccgtcaacgcgttgctaggcggcgcggtcaagcagctgagcgtaccgaagaacatgcggcgcaggatctcgaaagagcctttgggggcgctggaagtgtggagggcgcggccgccgatgcgtggtcagaaagcaggacgcgcatcaccgagaggcggccgtacagcacttatggtcgccagggcaagtgaattcggcaaccgaagggcgtcggtgaacgacagcatcggtggcagctcatgtatacctgtgtcttcgacaggatcttttcggctccagagcgctcatcgtgctcgacactttcaagctcgactagcccgagacggtaagctaacttatctcggccaatcaagcgcggtacattgacagcctgaccccgatcgctgacttgtacaagacatttgcggcggctgcgacggtcgaagacggcgaggcagctcgggctttatccgctataatggctactgcctcctcacccctctctccttaccccgctcactcatccccgcccgttccgtctttctcgttcgctggacgaattacttgcctcaaacggcggtggagtggatgtcgatttcactctctttgaccgtttcgttgagtacggcgggcaaagctaccgggtcgtgctgctctggatcaatcatcgctcatcgtcgagacactcgtggccttgacaacgcgcttgccgagcttgaacggggacgaaaccggtcgaccagtaccggctgggctggaggtgcgcgcttcgtcgacatctttcatggtggagcgaggattaactccgatgtggattgatgacgacggtcgcgaaccgaaaatcaaggtcagcaagatgtggcgacatccagtcactccgaggtcgacctccgtcatgtgcgtcagcgtttggagcggagagtttctgagtagaaccgaggtacttgcgaagtgcggtaggtagcaagtcagagaaagggaggaaaaggctgagaagcagagaagtcaggctgaagacttttactcagtggctggctggccagcgcgacaggtcgaccaatatcctccggcgtgttcgcgaccaccactgggtgacaaaaagacagctggctgcaggattcgaacctgcgccctacaagaggaggtgatggtcgtgtatattcgaatcaaccgccgtaaccacttggctaagccagctgatgatttacacattttacaataatactagatggcgcctttcgtacccagcgtatcacaatcggttggagagtgtttcacagcgggctcgccaccgcctgtcactgcaatgaccgtcttgccgcccccccccgttcctccgagtagcttccggctggcttcgctctgttgtgtcctgatcgccacatgctgtccaccctcactctcgctccacacgtccgtcctttgatcgcaacagtctcggacgccctcctccctgtcatctcttctctctttcttctctggctcaaatccctgcgtcgatccttctctttccactttctttgctgcaggcgctatcataattgtcagtcttgcgccttccctccctctcgcagctctgtctgcccgtctggcgtccctcttccttctcgcgctgccttccgcccgccgctaagcccttcaccaaccaccgtcatcggttcgtctaccatgaccttgtcccgcccggtcggagcagagctggtcatcttgacgtcgctcaggtcgacgagcctgccctttgactcacctccaggactcacctccagcccagggcgacgcagcatgaagtctgcctgggccggccggctcgccggaaaagaccaagatggtgtcgttgtccgaggcgggcagagcagcagccttgctcattgcgttgctcatcgtgcggctcgtgttgagcggcggcgggcgattgtttggtcgccccgcttcaggggcggcgggcgacgtgcttatcaacttttgtctcgatgtccgcttctccccctggcttgctgtcagccccacaggacctccagctcaaccaacccgatctccgtcgacgttcgagcttcaatttaccacttcggctcgaggcctggagcttcgacttcaatcacggcgctgtgcaatcggactttccccctcacttgaagcagctcgacgccttcagcgggccagtgcgctgctcgatccttcatctttctcgtctccttccgcagctcgctcaaagcacatgcagacctctcgttgcctatcggcctcctccgcctttatgcccgctggtctcgtgctgatgttcgcgtcaaccatcgcccgtcctcgcccgtcctcgatcgccagcctcgcgccagcctcgccagctcccgggcctgcgtcggcctctcgaccttcctcgcccgccaacgccagccctggttctacctcggacttgcccgtcgtatcttgacttcgatccaagattgccttcgcccagttgtgcagccccgtcttgccaaccccttcccgagcacctaggcgccacaagagagctggtgcgtctttcttcgtcgcccgttatcttattctgcaactcgcacgttgcacaagctgacctttggtcaccttttggttatcctccgtccgttgctcccgcctcaatcatcgtccaggctcagcccgcctgtcttctcggccaggggacgcttttccaacagctggcgattggctgctcttgcgtagcaggacaacggcccgacaaacaccctcgccgcctcgcgtccgccggcggcggttcaattctcttcgcgccctgcttaatcttgcgtctcactcatcgccgacctgatccacggtcactttttcctcgagctagcctctagactgcaggcttgccatgaagtttgtcctttggcgccatctcctgaattcgctaccagcgctagtatcttggcctcagggctgacctgccgtcttacgatagtttcatgcttcctgctgtttattgatcccacagttttagctactgagcatcaactcgtctttgagccgccccactcgccatcgagtttgatgccgtctcgaagcccctgggcaacagagacattgcgctcgatggtttctgcagccagacctcctcgcttacctgtgacggagtcggccgcaaaggagaaaaggtgctctgtgtaggcggaggcaccgagcaaggtcaggtaaaggggcgccaaggttgtcaaaggaggcagcgtcgtcaggttgcgctgaaggagagcgagcggaagtgcaacagcaaagacaagtgacaaacttagaggctaactttgccttgatgacgtaccttcccaacaggcaagggttcgaccttgccagcgcctgcacccgcgccgttgaggtagcgatgaacctcggctgttcactccgcagccgccgttcaattttgtctgcgactggaggagagaagccaaggccatccttctcgtcgtcctccttggcaagcgtgtcagagccaggcgagggggcggcagaggatgctcgggcgttaccgcgaggggggattcttgctgcgtggccagctcgagagatgcccccttgacgccatcggctaaagccaagatgtgaactcgatgaacttgaggctcagtgccgggttgaagactgcatcaagtcaaagctgtgttagacgtccttcttcgactcgtcgccgagcactcagactgacctgcagccttgcgaagagcgtcgcgctcgagctcctccttcagatggccgtcgatcttgattgtcatcgcgtcgatggccgcagtcccgttggagcggcgcttggcgatcgactgctgccaagggtcagcaaatcgagggcgtatccgaaccagctcgaccaggccctggcgccgttacctgcgatccaacgactttgaaggctgtaagtcttgccaatcaattcacatttcaactaattcatgagttattcatcatcagtcgggagcgccggacgaatgagttgaattggttgcgacatttcgccataatctatgcaaaccacgagtcattctcagccagaaggcctgatttgattgcctcaatcacattcaatggaagtcagagagtgccattgcgctcgtcctcgtcgagggccgccttctaacctgactgactggctggctggctgcaggcctttgtcgatcagaaagtccttaatggtcgacgttgggttggcgctcgaccgcagcggaccgtgccaggggtcgagcttccggcaatgagcaaccgagctcagatgctggaagccgccgagaggtcttggccgcgaatgagagagaatcatcgggaataacgccaatgaaggttctgccggaccctgcgacctgtcgaagatgacggcagtccattcgctccggcgggcggcgatctcgtcccggagaaatcgaggtgagacgtctcctcgcgccggttggctgctatgacgtgaaagaatttttgagggggctccccatgcttctcttcagctcggtcccgcgctcggcgggcgagaaaaacagttgtcgcagggcagcggttgggcaaggtgtcgtcctcgggccgaggacgcgtgcgatggccgagcttgtcaggttgagcgcgataaggccaggtagtgttgccagcctcgacgaaaaagcgaccgctgctgctgaggggtggtgcctcgatcaaagacaatgtgcgtgtcggctcgaacctcgggcggtgagacccctgggggagacggcgtcgtctttgccgacgagcagagcgggcgaggagtagcagactgcgttgctgttgaccggaaagggggaggacagcgtgcagaccagcgaggtcgtccggctaggtgcaggatggaggtccgacgacgtcgggtcagactccgcccctcacctctgctctcgcactctttcacacaccgtctctttggggctcccaccttctcgcccttccatccttagacctgctgacgccctgacctcccgccgtcagtcaactcgctcgcttctcactcgcttgctccctcgattggtctgacacgtctgctctcattgcactcggctaagcccccccagtctgaggcgtccgggtgtccatagacggccgggtcggcgttaattagctcgaagttgatgccagcgcttaagagcgccactcgccctgtcgtcgatgatgttgatgcggctcgccgagacaagagggcgcactttgtggcagaagaatgtgtcaggtctgagtagggtcatcatctctcacaccgcccgctcgttgtagtcagagactgtgccgcgcttcgcctgtcaatcagcgcgcaaccgggtcaacaagaaggtcagctcgcgctcgcggcctagcgagacgcggtgcacgaaggagggacgcacgtgccagtgagatcgctacacggccgctgagctagtcaaccagtatctcacccgcaatatgtaacaagaccattccagtacgcctatactggtatgctacactttacctaccattatcctccttcgggcggtcttaggatcatgcaccagatcgttcgtggtgtagttacaggttgagggcctcgactacaaagagactctccccctcgatctcaaagacggccacggccaagctcttgctgtcgtcctgacgggtcggtctcattcacatgtccagcagtgcgacgtcgcccgctacgatcgatggtcacctgctcgaccgcggcttcgaggccacagacccggacgcttccctctacgcactcaacaaattcaaagggcggctccttctcctcctctatgttgatgttgacgactgctccgttgtcggcacagagaggcaggtccagagaatcatcaaattgttgtctatcaaatgggaggtcgacaacagaagggatatcacacggccagttattgggcgttgggcgccagcattggccagacggtacgagtatcctgaccgaaatcctttacgccaaggaaaagatcgaggagctgctgccagtagacttaccagcgtaaagtaccgtagcagtatgcctgtctggtgcggtactggtacatatatggaaatgatactgggttgcaccggctcggcgccgtttatccggaccttatccttcccgatctcttcgacgactcttcaagcggcatccgctctcaaagattgcgacaatccgccggaagctgagccacgacaacgacttgccggttgaggaagccatggcgtctgtaagggctgggatcaggagaccctgcactagaacgccccaagggcgtaccggcaacagccatatcaacagtgagcagaccccgcccacagatcccgatagagagccccgcctcacgagcggtacctgcggagcgaagccgattaccagcgtagccagcgttgagcaaccgcccacagcaccggccaagcgcgcaaagtagcgaaagatcttcaagcgtaaccagttcgatcaaccgcggcaaagtgagcagcaacaattgtttttttacttcggtgcctctcttttccgatgaacgtccggcagcgcaactgcctcctatttccgcaccaggccgagctttgacgtacgctgccattgcttcagtgctcgagacctcatcccgcctccacactccatcttgtatacggctgctgagtcagtacttccagtatttcatccgggatatttattcaccagtaccgcacttctttagaggactggatgcggtacgaacacgaatcgcggagggaagccggccgctctggtgctgagagtgaaggcgccggcaacccgtccggcggttaaagatacggctgagtcccgtgccgtgcgagagcgctcgtcgcaaccttaacaagtacgtacaggtacaatcccgtgcgacttccgccatgcttttgcccgcgtcacaatgtccttcaggtcgtcgcacattagaatgctgtggtgaagcggaaggaagctcgagcgtccgggggccatcgtgatcgttgagacaggttgcacggactcaaggctgcttcttcgaaccgggcgggagctggccctgactgggtcgcatcagtgccgttgtgcaagtcaatgccggtcaatggagcggcggcggcgagaactgaagctgagacatccgccctgacgaccggtaagattggcctgctcgtgcgtcccagagggtcagcagcctcggcaaactgagcagaggtgggagcatcgccgcccttgggcgggaagtgtcaagtcaaccggtatctcttcatttcgcggtcggatgaacctgaaggcaacgacgtcaagcgccagctcgaccgtgagtgcaaggcagattcggaacgggcgaatgtcaccgatccagtcggcatctcctgcaatagactcgtacctgaggtgcaagaggagggcggtcggtcaggcaggcattgctgcttttatagagggcggtataagcctcggccgtcactgttccgatgaaggacagagttacgttgtacgggggaaaccgggcaaaagtccaccgctaagcatcaaaaattattgcctagcgcggctcgtttaccgtgtatcaccagcagggaagaaagtgttagagagtgaccgtgcgggaatcaacaaggagctggcgactcacctcgttgaccgcaacttccttcccggccattcatctctgggcgcgcgtcccggttaccaccgagttgaggccacgatagagaaaccctccgattgcagatttgtcatcagtggggccataaccgacggtggagaacaggtgacgaaggcagcgcctgaaggtcgtcgtaactgaagtctcgacgtgtgaaaggcattgatagcgcgtgcaacattcattcagcgacaggtgatgcagcaaaaggttgaatgtgcctggtgagccagagctaaagccacatatataaaaagcaatagtcagcattacaaggaggtctggccaatataaaataaagaaccataataaattgatgacgaaaggcgggaaacaaacatgggtgacaaaagcgacgttaggcacaatgttgatattatgccgccactcaaagttatttgcccgaaatcggcgtgaagtagctcttcacagaccttctgacgtcagttgggtacacgacaaatccgactaggaacacgcaaaacaaaccaatctgtaagcgcgggcgccccaaagccgaggaatggggcgcgcagaaaagaacgatcagttgattactgtcttcgtgccacgcaggatcgtttggcctttactttcagttcgaagcgcagtcaagttttcctcagcgtgtaggccagtcctttgccccgaagcgaccaaaaagtgagctctttttgggaggtgtcatcaccctccgtttagttcagaagtcaaacagtacagcgacttttcacgtcttagtttgagacgccttcgaaagtttgcgtaacatagaaatacgagcccaatagaaccttccaagattagggttaacgttgagcattgaacgccaacaatatcgatggctttaaggaccaaaacaacattaataggagcatttctgatgtttagtatctggtgcttttaaccgctaatgagctctgaacgacgaccgcgcaacagaaaacagaaccggcttcagcagctgtttgtttcgttgcagccagcacattgtcgtcgcattaatattcttgttctcaatgttgtgtcggccaatactgaaagcaagtatgacaggccgcgagtcacattttttcctagtcagtgcgcggacaaaaacgagttttcaggacctaagaatgacatttgttgaaggaagctttagtcttgtgattggaccgcaaaggccgcggactgacttccgttctgaggttaatatagttgatgagtgataggtagcacagatcttttgctgaagtatcaagagtcgcggaaaaaatgtgagctcgtgctactgctcgttcaaactgcaaaacgaaaaacttcttgtcagtttgtggtggtaacttacagtgaaagccgacggcacggtttcctatgtctttcgacgcttcgatgcacgagtcaagtgctgctcgagacttgcaggtgtgagtatcgtagatagaaattatgatagtatgaagccctgtactgccaggcgtgcgcatgataattgttttggctggatactggtcgcagcgacgaggtgcttgcatcgccctccctgggagtgagtgtatgaccttgcgtcgcaatccaggttgaggtagggaagctgatgagcgtaagagcattgcttgctgttgaagaatcattcttccagattgagtagagaatcagtaatttttgggttattctttcaatatgtattatgcacgcaggctcgacaacaaaaatacgtgttctttggcgagtgaatacgctcttattcacaatgtgcgtcagcgcgttgtgatgacttgatctgaagatatctatcatcagggcaattgccattgatgagcaaaccgagaaaagaaagacccgcaagcgtcaggcccgagtaagtcaaatgattggccaatgacgaacggagccggacgtcgaaggtagacttttcgtagcgtaaccccttcgttttcgcgcagtagcaaatgtcattgaaattcaggataactagggttgtaaagctgaattcatgcccgctggggcttgcgtgcgctgcaagctgcacagcagggcatgaagagctcgaccctatgcttttgccctagcatggttgctcgaatacgacgccagaaggaagccctgccgcctccgatatttgaagaatcatccaggaattgtgcttcggtcagcacctctgtgtgtccgcacacttttgccctccgcttgaatgcccagctcgcagcagcgagggaaggacggctccagctcgctggaggagcaaactggacgttggcacgcataaaatggctgcctgtggcgctgcccttgtagctgccatacaagcaactgatctcatctgctaaacataagtctacctgctctcttctcccatgtttttgtaatgttcttctccttttgcttttagggttagggttagggtgtaacggggcatgcgatgggagcagaaggtcagaggcgctatagacggtggtacattggaggcgagaaggagttcaagtggctaagaggcttcgcctagaaggcgaagaagcgagcacgggcacggagcagagagagcgagaggaggcgagagaagagaccatagcgaggcataaggccccgccagtgagcaaagagggcaacagtcgaaggagaaagagttccaccggtcgagatgacgatcgggtggaagggagacgacgtccggccgtcgtacttcgagcgcttctggttctcggttgaggtgagttcgttgaggagagaaccagaggcgcaagcagtacgcggcgcagcgtcggcagagacaccagcaggcagcagcgacgacggaaggccggcgacgtcggcagagccgatcggatcacggccagcaagggtcccctgtctcaccccccccccgccggatcgcgactttttctgtccctcctctctctacttatttggtttccctcctgtcgccccattctgtacgaccaaatccccccaaccccggcctgctatccactctgcatccgatgcgtcatcatatcgacctccctcgtgacgagctcgcttgctcgacgtaccgcccagaccttcgagacgagacgctgcgctgcaacgctgaaataacgctgcggacccaatggtgtagagccggcgaagagcttcaggatctcgacctggagctcgagcggcagcctgggtgcgtgtgagtggtgctgcaggccgaccggggcgacagcgagagccgggcggaaggcagtacaagcttctcgtcagagaggcggctgcaggcagcgccgagatctcaggagacacgcacgagctgaacagcgtgcgacatggcgaacttggacgggtgttgactggcggctggctatgcgagagtcgagaggcaagggcgaaggtgctggtcaggcggaaaggagcgacggtcgctggccggccttcctcgagtccatcgcgccgccctgttggccgtcaatgagggctctcacgcgtcactttggcatcaacccgaccaaatcggccagagctccttcaactaccttcatgtcatgagggcacggccggcggcatctcgcgtcctgtcaggtcgagcgagctctggtggcggcgcgcagcggcccgtcgctacgcgccctcgtcccttgtccctggacaggcgttttccttgccactaaccctcccagcagcgaccgaggctgtcgcatttccaatagcctcctgcctctgtctagacctcacccctgccgcgtcgcagccctccggcattcgaggcgcttgcgcacccttcccaccttccatgctccttgcctctactgctggtcctaaaacacggggggcatcacatcgaagctgaacagcacgattactcctgagcctgctcatgctccaccgcgacaatgccggcgcgctaaaagaaatagggtttgggagaagagaaggcagggagaggtcagcttcagtcgtcgcaagagtccagccaagcgacgaggacgcaccttgtcggcgagccggagggccttgcgctcgcgcagggccttgttgcgcgtccgccgggcctccatctggtcgccgagcgtcttggtccggagcgcctcggccttgtcgtggtgaatacgctccatcaggacacgcttgttcttgaagacgttacccttcgacttgaggtagagcgagtggtacctaaagcgcaagagagcgtgagtcagcaaccggttgaatagctctcacccacgccggaacgcacatgtgcttgtcgatcttgccagcgtcacggtacttcttgagcaggcgacggaggacccgcatgcggcgcatccactggaccttggtcgggaaacgggcgtcggccgtacccttgcgcttaccggcaccggtgtggcgacccttgcgcttcgaggcgaggaggtcacgggcacgcgagcgcgagtggatcgtcgtcggcttcacaatgatgtggccgtccttgatcagcttggcaacacccttgcgcgagttggcgttggcgatctcggcagcctcctgggggtcaagccagatcttgcgcttgccgacaccggcgacggacgccgcgaggcgcttctgaatgcgaaggtcggagagcttggccactgcagaagcgcaagacgaagcggagacggttagccgaggtgctctgcggaaggcccggctccgccgagagcagcatgcagcagcgacgacagcagcggcgtgtgcggcagcgagagcaccaaacagtcctgtgagcggccgagcagcaggcaaaatcaagcttgacctctagtgagagctcgagagctgcgcccgaatgcctgctcgaccgctacggctcagaggtccgacctcctgcccgtcgcagcgcgttctagacgaccctgcaaccctactgctcccagcacccctctgactgccctccctccgatctgccgcctgcaatctacacgaccggtcaggccaagcccaatgccgagctccacctgcagcggcggagtgccgcctaagcgccgctcgtcaggcacgacccgacgaggccattacgacgaggtgtcgccgctgctgctcccacatctgctgctgctgccgatgccgatgccgattgctgctgctaaagaggggactcgctttttgcttgtgggtttgcttgaagactggtgaggcggacaagggggaaggaatgaggtggaccggaggcgcagacgcacaagtgcctgtccgcgggacgcttgcggaaatgcccttataaaacccagatgcacggggccggcagtttcagctgcgagccggcccttcatacggggtcagggtaaggtcacggcaaacgctcaaacatgttgggtcaaagcgtctccaactactgtgctgggacgggtgctatgcgacgagaatatctcgtcgttcaaaggtcagaaaagcgacgagaaatggaaccgcgatcgcgacaggagcgcccgctggcccctttcgtttcggcgcctcccgaagaacacccacccctgcctgcccttgttgtacgcccagctcaccctttttaaggcctgtctctacttgccgcgtcgcttgcgtcgcccttcctgctcgtctgcccaaaagctcgcacgccagctcttaccgatgaaggcggcactgcgcccgctcgtcggccgctccctgcgaccggccgccttcctccactccatcgcctgcagcagcagcagcagcagcagctacgccagcagcagccacgccagcaggagtcgttcgacgtgcagcagcagctttcccagcgcccacgctggtccatcgaccggcctgccacgcctcggtcggctgaccggcgtgcgcgcctacgcgagcaagccggcgacgaacgatgacggctgggtccgggtctcgtccagcggcgaggtcgcggaggaggagccgtactacgaggaggagcccgtcgaggcgaaggaggagcagcagcaggagaacctcgggccgctcggcgactggtcgggtcgagcggccgctgcgcgccggcctgccgtggccgagcacatccggcagggccacaagtcgaagcggatcaagctcgacggcaagacaaagtcgtttatcctcgacctccaccggcgggatcccgtcacgtacgacgagtggggcatccgccggctctacccctacatgaaggtccgagcaatccgggcgatcctcgccgaggacggcgaaggcttcgaggaggacgacgaggcctttgtcgctgcacactctgagctcgaggctgagctcgccgagatggacgaggctgcgtacggtatcggcgaggacctctttgccgacgtcggcatcgttggcgatgaggggctcgtcgtcgagcgcgaccgcgacgattgggactcagacgacgagaacgaggtcctcatgagccgggccgagctcgagcgcgagcgacaagcggtccttcaggcgtggaagggccaaggcttcctcagcaagccggtcccgttcgacatctcggccccggggaagccaaagtggtctgaccccggccggattaaaaacgaccgccgcgcgtccgaggttgccttcctgccctacaggtgcgacacctcggccttcgttcgagcttggtcactcgactgattcccccaacgcccatgcttcgccgcagagatggcgatgccgcgactgtccttgacgtcgatgccaagcgcgctctcctcgcaggccgacgcccagtcccgcccgcctcgatcggcattggcccagattcgcgaaatcgccacggagcccgcagcgaccaagccgacagtcgctacggcgctcggagcgatcgaggcgacggccgctacggcgctcggagcgagcggcccaccagccgcggcgacggtcgcaagtcctcttcggcctcctttggcttgcagccctcgacctcgagcagtagaccggcccgcgagtcccgcgagtcgttcaaggagccgtccacgccggcgctggtcgccagcccattcatcctccagctcgacacgatccgggagctccagcggaagcgtgagcagcgggctaagggcccacctacgggctcgagtggtggcggtcgcgacggagctacgacggcctgatggctgcgatcgctctccctgctcgaccatctcgcctcgacggcacacgatacccccctcttcagcccgcctcgattgatgttggcatcatacctctcttgccggctatgggtgcaagggagcgcgcgcacgagtagtatagctgtcatcgagtccagaaagaggccacgctccactagactgctccagctgggcccgagcgggcctgacgggactgcgcagacgaacgacaggttgagtcgttgctgctgagcgacaggtagtcggtcggactaaaaatggtcgggaggccggcgcgcgcgtcattgcccggtcggctccgggcgccgactcagccggcctcggagggagagggagaagggtcgtcagccctcgagacgaacgtcttgccctcgaccagcattcttccgagcctacagcatcagccagcataagcaaaagaagcagcagtcgtcgtcgtcgcagccggcatctagagcaagctaccttctcgccttcctctcctccgcccagctccgctcgcccttcgcccagccatgtcgacctcgacaagctccgagaaggccgctgcctcggccgtcaagtcgaccctctcgccggccctgacgccgacctttaccgcaaaggactactcggtcttctttgcagccggcgccatctgctgcacgctctcgcacggcggcatgacgcccatcgacggtgcgttcttgctgctctcctgcctctttgaccggccgctcttcgccctgatggctgactccgctcgcacgactacccgccagtcgtgaagacccggctccagatcgacccggcgctcaagggctcgggcatgatcgccgccggccgcaagattgtcgccgctgagggcgcaaagggcctcctcgcgggctttgggcccacggccgtcggctacctcttccaaggcggcgccaagtttgccggctacgagtactggaagaagcagctcgtcgagctctcgggcagccaggaggcggctgtcgccaaccggacggccatctacctcgtcggcgcctcgatcgcagagtttttcgccgacatcctcctgacgccgctcgaggcgacccggatccgactcgtctcggaccccaagtatgcgagcgggctcgtctctggctttacccggcttgcgagcgaggagggcgtcgccgggctttacgccggcttcctcccgatcctctgcaagcaggtgccgtatgcgatcggccagttctcggtcaacgagtttatgcacgagctcgcctataaggacatgtcggccgaggagaaggctaacctgtcggccacaaagtcgctcggcatcaacctcggctcgggcatcattgccggctttgccgccgccgtcctctcgcacccggccgacacgctcctcagccagatcaacaagggccacggcccgacgggatcgatggtccaccggctgaccgtcctcggcaaggaggccggcttccgcggcctctttgctggcctcggcccgaggatgatcatgacggccggcctcgtcagctctcagttcctcatgtacggcaccatcaaggtctgtcttttgtctttctcccgctaccttctgctttctcgagcgcgcggctgacccctcttgctctaaccaggatgctctgaatgccagccctggcatcgagatccacgacgactagacgcctcaatctctcacgctcttgagccctccctagatgccctcattgcatgacccctgtagccctaaacgactgcttttgcctgtgcgagttggtgctgcgcgtcgtgctacagctgctgtcggccaccgccttgcaaaaatcgcgaccgctgcaacgggcggtgctctgaatgaggctcgctcaagatcggttaacggacatgtacgccagatatcgcccgcctcgattgcgaagcgggacgcggggggacgaagatgcagtgggccgtgcgcgcgcctctcctgaatcaaaggggtcgcgcgtcaaagggggttcggccggccgccgtctttccttcaccacaaccaccaccccgcttcattctcatctgtcccagagaccttcgaccgagccctttcgccctcgctctcgccctgctccccacccctatccaacgacaggcccagctacctagacctcgcatgccagtcgagctccagctcgaagtcctacgcaacatcacggcctcgatggcatgggactagtcgcaaggggctgcagctcttgtcaagcttcgccttgtcttcaaggcgtgggtagtacgtccttgcgcgaccgagctcgggtcgaacgagctgctaggctgacgctacttttccccgcggctatccagaccgagggacaaatactcttctataggcgcatcattacgactataaatgagcgtctggaccctcgagccgtcagtggcgtacgatctacaagtccaagcggccagacggccagcccggcaccctcgtccagcagctcgacttgaggggcgagtggttttactccgacgagtaccacactctcgacctcgactttgtcctcaagtcggtcccgaagctcaagtggctcgaagttgtcctctgggccgcgtactacccctatttgcccctgagcttcttccggaagcgccccgtctcgctcgactcgcgaccacgcgccatgaagatcccgctcgatgtgcgctgcctcagccggtcgctcatcacctggatcgacttagccaccttcagcggctcggcatccacctgttggcgggccagacgcttcacgtgatcgacgtccagcgcgaggtcccggtcgacctgcacgccttgacgattacctgcgttcctcctcgaatgccgctgcagtacgcagagcgtcaggcgatcgtcggagccttcgatcgcttcaagaagctctacacgctcacgatccactcgcaggactttaccgactcctagcacacacgtgagctcatcattgccctgcccggcatccgccggctcgtctgcaacgtcaaggtcctcaacaacctgctggccggcccccacgccctcgcctccctcgagttggtcaagcttgagcaccgcatcgacgacgcttacggtacatgctgtcgaggcgccctgcgttccgactgcggctgtggcatcaatgtgcgctcgaccctcgacaacgtctgctctatcgtccgcactgctccggcccgcttcccggcgctgcagacggttgtcgtgagcgccgaggaatcccgcgcgcctgcctccttcgaaaagaaggacctgcgacgccgtcttcagctgagcaagacggcgccgaggttccgcgctgctggcctgaagctcgtcgacgaggacggcaatgcctggcgccaggagtgggacaacgagtagcgggcggcttctcatggcgtttgatggtcggcgatgtgaatgtccgcttgctggtccgtctgacttcgcggtatcgaagggcagcagagcatgcgcggcgccggttcctgcaaggtcttcgaccccgcagacacgcatggtcaagtcctgctctgctttatctttccgatctagtgcggctttgcgtatgagtgagcagcatagatcaggggccgccagaccgacgtcagccggatctgaccacctgccacgacttcatcctgacaccaccccgtgccaatcgcctcctcagacgtcacatcctctcgctttctccctcctcgactttgacggtaaatgcgaggccagccctgctcaagggctgcctccgccgcctccgccgatgccgttctcggccgaggcattgcctgagctgatagcccgtgcgccggttagccgctggtttgattctagcccgccaccgccgccgccgtcacgagcgaggaccttgaggctaccgacgatgcgctcggcgagctcgcggacgttgggctgagcgacgacgacggccgtcgtgaagtcgacgtcaaaggcgagccggatgcccttgatgaggcgctcggcctggtcggccgacatgatggtgaagtcgtctgggtcgtctgtcgccagcgccgtcgatgagtccgacgagatggtcgagagcgcccgtcgaagcgggtcgcgtgcatcggcttggccgtcagcgacgcttgactcgggagcagcgttgagcgtctcgtcatcagctgccgagcgcgtcgcgctttcgccagcagagacaagcggcgatgccggctcgcgaacgggcagcattgggctgatcgccccggcgacggcggcggtcggcgtccggaccgactgaggggtggcgatcgacgactggggaatgagcgagctgtccgagtcgagcgcgagcgtgacgatgcgcgtcaggatctcctggaccgagctgagcgacatcgggtcctcgggccgaggcacaaagatctcaagcggcgcgagccgggccatgacgttgtgcttgccgtcgtgatggtagcggagctcgtacgagccggcgttccagggcagagcgttgcccttgagtgtgacggtgccggaagcgaccgatgctgaagccgagccggtcgcgtcgtcatcctcgtcgctgatgggcacctcgccatcgtactggtcggcgaagatcgggacccacttgccggcgcttgagatgcgggtgacgagagtcgacttgcaggcgtcgagccggtagatctggatgatgtcgggaaggatggcgtcagattaaagtgtaaatggcgacaagcagttcgtgagtaggacgcacgccaatccagtcgcgcttcgagtgcgtaacaggcgcctgccattggatcttgatggcctcgccgatgtggaagcgcgagatggtcgtgtcctcggccgagcggttcatgtcagcaacagacggcacgagcgcgaggctgtagtcggtcgtgtcgggaaggtctttggcaacgcggctgtcggcgcgggcggagcagaagattcagatgagttcagggagctgacataacgtgcagaggcgaggagggtagggaacgcacgtgatgacaagccgctcgcgcgactgctggagcaggaacttagtatcctcgacgacctcggacagcttcggccgagcgctctcgaggaactcctcgacggtgtgcgtgatcttgcggtcgaccttgtcaaacgtcccgcggacctcggagacgacgcgcttcatctccttgcgctggagcagcgccgagccctcgacgactgtcttgagcgtctgcgtgatgccggcgtccttgcggatcgcgtcgccgtagagctggcgcatgtgcgggctacggaagcggcagatggaggaagaggatggcggcaaggagttggagggtcagcgtctgcagatcgcgagggccgagtcgtctctttgattgaagagcaggcgacgcacctctcgacaaacgacaggaaccaccagtgcgagagagccgagaggatagcgagcgaggtgacaagcttgctgccgctaacgagtgcgaggccaaagaaggcggcgccgcccatgctgcgctcggggttgttgaggaagcggtagatgccggtgtaggcgagctgagaggccttctgcgggaggaagaagtccgagtagagccagccaaagtcgccgaggacctcgtacgtcgaggcggccgtccagaggtgaagggcgacgagcatctacgcgggaaagaccggtttaacgattcgtcacaaccagaggtgtcactgcccgcgcggtggcatggacgtacgcagccgagagtgtgccggagaagctgaccgccgacggtccagtcagaggggatcgagtaggtcgtccaggcgaggccgagaaacgaggctggagtggcagcgcatgagagtgaagacggtcagcctcgagccttaaatacgaatacagaccaagcatacacggcagaggatgccagcaggacgcaccgtacgtcatgcagagcgagaggttgtaggtcgccttccagttggcaaaggcgtcctgaacggcgccctcctcgccggccgggtaggcgtagtgcttgaggaagtggcggacgagccagcggttggccgactgcttgcgaaggatcgtgccgaggccaaacgagtggaagagccgccagctgagggcgtgaagaaagtgggcggcgagggccctgcggggcgagagtccgttgaagacggtcgcgcctaggaaggtgtagctgacgaggaggacgagcgcaaggtcggtcgaccggaagacgtcgaggttcttgaagacgacggcgtccttcttgaagtagcggggcgtcatatcgggtgcgagcgggccggtcgaggctgcggcagagccggcggacgagtcgctgctgctggcgccgctgccgtcgatgacagagccggccgtcgccgcgctgaccgacatgcgccgggcgaggggcttcttgccgccgccatagatgcggtcgatgtctgtacagaaggtgcggcgtgtcagtccagacggccggcaagggcatagacgagacgaggggcgaggctcacgagggttctcgaaccaaagtaggaagccaaactgggcggcatgggcggcgatcgagacaaagagaaccgtgtagctggcgacgatgatgctgaggccgtagaagccggcgtagccgaccgagtacatcgggtgcggcgcgaggttgtagacgccgtcaaagacaagctccttgttgaggatcgtctggtagaaggcgtcgccccagtaccacgcatagtctttgacgacgcggtgggcgtcaatcttgacccagaggttgaagaggatgagcgaggtgccgccgatccagcgaaggaggtgccaccagaccgagtggccagccgggagcgagcagaatgagaaggccatgagcgaatatgaaacaaagtcgctggaagcgcatgcaaggtcagcggaccgaggcgctgccaggagatgacaaagtgaagacgtacttgagcaggacaacatcgaccatctgcgggaggtggagaggaagggcggtcagcgtccggcgagagctgcgagcgcagtctaggcgtgcgaccaacctggcggaagaggagccagatggtgaactccttgggcgtctcctcaaacgtgtaggtcccgcggccgatcttgccctcaagctcgcgcttgcaccaggcggcgaccttgggccgcttgttggcgtcgagccagccgcgcttgaggacctcgttgacgatccagcgcgacttggactggcggatgaggatccagccgaggccgacgttgtaggcgagccggaaaaaggcaaagagcaggacaaagagtacgcgcgaaaccttgagcgggaggacgaggaagaggacgctgaaaaaataggggtcgaaacccgagggtcgggcgaggaaagacaaggaaaagcgcgtgaggccgtcagtccaaggcccggatgcaacgcaaagctgcgggcgaagtgtcgagcagcaggaagcaaagcacgcgtacgctctcaggcaacgcgagagcagcgccatgcgagccagcagtgccgcagcagaggagaggacgcacatctgaaggcccattgagccgagcgtgagcaggtcgagcgagctcttgcggctcgagggtgaggcgaggtgatgaaaccacgagtgcgtctcggggacggcaaagactgggagaatagttgccgcagaggcggcaggaggcgtcagctcctgtcgtctagataagatgacaaggagagcatgggcaggacagggcaagctgcctgcccgggccgctctttgatagacggaccttcgcccgacggcgtccggccaaagacggtctcgctgtcgtgctgctcggccgaagcggcggcgggtgcgggtgcgggtgacatggtggtagctgtctgttcgtgctctggagcgtgtgcggtacgcgacctttgggtctgctggcccatgcttcttcgtggtcttgacgggtcgacgtttgcaggcgccagcgcaagcaagatgggccggcgcgtccctccgaaagagccgtcagcttccccgccctgcccttccccgcaaccaccagacggccatcttgccatgtcgtttgcctttccgctctcgacgaccggcgcactttcgtttaacgaccacctgatcgcgcccgagcaagacctagctcttcgcctcgatcaggcgacgacggcccgagccggcctccgcggcgttctcaaggacgacaagcggacggccgatggccaacgcgacccgaatgccatcgtagcggtgggcacttcctcctcgtcaagagacagtgaagtcctgaagactgacgctagctcgcttacatgcaggccgtcgagatctacctgccctacctcggcgcgatccttggctcgctccagtcggacgatctcctcctccggtcggagccgagtgcgtcctctcagaccgcttcggacgtgcagtcgtctgactgaccgcctctcatgccgtcctcacgccacgctcagctttctcctggcggccggcgctgactcagtcgctcctgtcgtcgccggcccggctgccgttcgggtccttcctggccgagcatatcttcacgctgtacacttacctcgcctcgctcgcgctctcggcctcgctcctcgcccggtcccagagctcgacgactgacggcggtcgctcgtatgagctttcgccaaaggtaagcccggccgagcgcaaggcaagggacgagcatgtcggtcgagcggccgacgctctatgccgcgcggccggcgtcgcagaacatctcgtcccgctcgtcggcgagtgggagcggctgtttgacgacgatcggccgagcgctcggagcggcgcaggaggcgtcacagctcggctcggtggccgaggcggcggcgctcgtcgaccggtcgagagcagccgggcattcgcctcagcgctcgccaaactcctcctagccgacgcccaggcgctctcgatccgcaagctgctctcgccgacgctcgccagcagcccacacgtcggcccgccgctcgcaaagggccatccgtcgccgtcgctgctcgccaagctctacctttcggtcctcgacctctacacccagaccggcacgctcctcacctcgtcgtcgtcctcgcgaagcaaagggtccgacgacagcacgactgaagggcccgtcgcagagctcgtccgctacaccggtcagaacagagcgttcgtccaggcgctcgcgcggaaatggctcggcgtcgacgcgggcgagtcgggcaaggcggagcggatgggcgaggccatcgcttggctccgggacgccaaggcgacgctcgtcgagggcggcgcgagtagcagcggcggtagtggtggtggggggggtcttctcaagaagggcaagggaaaggtcgagagccggtggacggaggagctcgagagcgtgagcgcctttctgagcgcgtatgagaagctcaacaacagcgtgcgtcccttcttcttcctcgacttggctgtcaccgtgggcgcttgactgactgcctctcaccctcttctcgtgcaggtctactttacgccgatcccgccgctttcctccctcctgccgctcatacccgccggccgatccgtcctcgccgtcaagccgtacgtccctctgcggccggcctttgggcctggcagcgaggactacacgccgcgcggcgggtccgggctcgaggagggctttgggcagctggccgtcgctgaccgcccgagagacgaggaaacgccggcggcgactggcgagggctactactgagatcaagaatcttatcagaggtcgatcttgtagtgacagtgcactcgcatgacgtctagagtcgatgaccagggtcgcgagcgacaactgctgcgcgtggccgccgtcgcgccccttcgacacgccctttgtcgaccctcccgacagccaccttctctcctcccatccattcagcacgcccacccagctctccagcttcgatggccgagaccgctctcgcgaactttcggctcttcatccatcgaccgccgaccgccgacgggtcggcccaggccagcagctccgccctcgatgaaggaagggcgcgacgcctgctcgagcacctccgtaatgactggccggccatggacgtcgtcctcgcctcgaagagcgggagcagcaccagcaacgacacagctggtttggtagctgctggaagagcgcgctgcggcaagggtcgggcatggggtgagcgaccgagcgaggtcgagcggctcaaggcctctgggccgccccctcgcgtcctggcagacgctttgcctgccgcctcgacgacgtcggcacccgccgtcgctgaaccatcggccacgccatccatatctggctcctcggcgcggctgaagcgcaagcgcaaggtcgaacggcctgccctcgacaatggcgaccaccgtccgggtgtcggccgctgcttcggcgtcctcccgggtcagggacggcggcggcgggcggagggcggaaagcgagggtcgacagcgacgacgacgagtttgacttgtgatgttaagctgctgctgcgcacgaccgtctgaccatctgaccggccgaccgacgaggaataaaagagcgcatcgtgcaaagctcgtctctcgcccagctcaccagccaccggacctcttcactcccacgcctcagggtcgtccgccttgagccgcttccgccggcgctcaacggccctctcgtcctccctctccctctcagcctgccgctcccgtgccctctcatccttcgcatcccccttgacgagccgcctcgtcgtccacctgcgtccgagccagttctgccccgtccggtcaacgagcgactcgacgtcgtgcatcggcgagccgagcgcgagccgcttcagctgccagaggtcgatgtcctcgcccggcaggttgatgtcgggcggctccgtgctcagctcctctaggttcgggcagagccggaggatgtcgctcagcgtgagggcgatccgcctgctcgggtcgcgcgcaacaagcggctggtggccgtagtggaagtggagcgtcttaagccggtggccaaactcgtcgaggtagaggaagacttcgtaggcgacgttttcgtcaaactcttgcgtgtagatccggacgtcggtcaggtgtcggaaggggaacctgctcgagagaacgagcgggtgaaagggagcatgtcagccacggggaaagaggcagaggaagataagggaagggggacggacggcggcttgcgtcctccgttctgcgtgacgccagtgtgcgagaagcgccgtgccgcatacgtgacggttgtcagctcgtcccagttgaggttctcgagcccgatcggcagcaggaacgtgtcggcgtcggtgtcgagtacgaggtggcgcagcgtcccgcggtagccgcgcagagccttgagaaactggccgggcttctctgggagaccctccttctgccttgaccaatcgatgggagcccgaagtggtccgggagagacgagcgggcaggcctctagcgtctccccatagtggatgacgagcgtcttgaggtgccggaaacgctcgcgcttgtacttgatctcccggagccaggcggtgaaagcagacacgttcgggttcatccgcgggaggtgaaagtggaccgtctcgtagagggccttctcggcgacggtctgcgtataagagcaagagtttcagccgactttgggcagatcgagaccaggagaggaggaggactcacccgccacgccttgctaaagagcgagaactgctttgcccaccatgtcgcgtcaaagatcgagtcgaccgtcacaacctcgaaggctgggttgccctcccagcgcaacgcatagtacgcgacgaccagcgcgacttcggccgggagccgtcggaattgatcgttgagctcgacagccggccgggagaggacggcgtgacgttcggccgcctcctcggcggagagcggccgacgagggacgacctgccaccagcccggcagcgggctagggggcggcagtggagcaggacccggcgtcggcgagacgtggtacggccgaggccggtctgcgttcagcagctggccgtcggtcgtcggccgtctgttgctgccgctgctgctggtgctggcgtcgaagcgcgcggtcgacggcgcccggctctcgtagcctgcaggaaccgacgacggccgtgagcgggggtcggtcggccttgaacgggggtcaacggggcgggaggccatgcttgggcgatggcggtccaggtcgagggagcgacgaggcgatggtccgcttcgaggcggacgcgtcgagagccagacatgccgtcgtttccgcctctcgtcgacagggacgaggccttcttcatagcacgctccggcactgagtgttaatgtccatgtttaaagagatcgagcgagaccagtcgtgtctgctccctcccggccgccagcctcaggcagcgccgccctcctctcccgagcggcacggcagccgcccaactatccgaccgcagcagcctaagcgagcgacttgataaagtcctgcgagtcgatccaggcagagcgcgcgttagtctgctgctcgagagcgctctcaaaagaggcgccgtcgatcgcacctgctcgagccggctgacggccgccttgaactgctccgtctccttccagcagtccaagggccggtccttgttcttcctgcagagtgagtcaggaggagagccacaccatcagctgccaacctacggttcgcactacgcagcgccgcagacgtacagcaagcaagccttgacgccctccctcgcctggccaacctcgccactctcgacgctcgcgaccttccgctggacgcgctcgaccttggcgcggacctcgtcgaggtcacccttgagaatcgcgctcgtcgtccctgccgcgctcgacgaggcctccttggttgtgttgctcgccgagagctcggacgcgagcgacttggcgagggcggcctcttgctcgcggagcgaggacagggagcgcgcgagctgggcgcggatgtggtcgctacgaccaaaagagaggcaggtcagcatctcggatcgtcagagtctggctcgcacaagctgggacgcactcgagcgacgactgccgggccggcgaaggggccgtcgagttgctcgggtcggacatctgggcgatcagctcgggcgagaactgtaccaaggggaaggctcggcgtgaatgtcagcccttactccagcggcagctacagaggaaggacaagggcgagggcagtcctgtcgagctcgcagctggccctgccgatgacagaggtctcgcccagaagcaaggcgctcggtcggcgataggcggcacacgacgtgccgtgctgctaaggcgactcctctcgctcgccagctcgatatcctacgccgcagggctttgcgcccatggctctccaggcgcgtttcgtatcttgagccgacgggtaaagccctgaccagctggagaaggacggcgacgagtgccgcgcgggccggcgcgcgaagacggggagagagtgacgacgaacctggacggtccccttgcccgattcggggtagaagacggcctccttgccggaggccgaagcggcagtcgactggcctgcgcccatcttttaacgaagcggaaaggaagaagggagggtcgggagaagggaacggggcgtggtggttgtagggcaggagggacggctgggcgagcggcgtcgacaggcgcgcagagcagcaacggtcgatgatcgcccggtagatggttcatcaagagatggagagcatgatccggagagcatacaggccgacgctggagagctatagctatgctgtcctgtctctgctcatgctggcttgtcgacaaggcgtggcgaaggggccggcgacagctctttcggcatgcgccgcctcgtcgtcgttcctccctcctcaccatcaccccgaccacccgtctcgcaccaggatgtcggccagctcgtcacccctctcttcagccctgagccagctctcggacgacccatcagacgaggtcgaggatgacgtcccgctcgagtctgggtctgctgccgttgtcgacgctgctgctgtcgctgctgctcccggcccgacgcgatcgacccgtcggtacacggctgccgctgctgccggtccctcttcagacgaggcgcccactagcaacagcggaggaggaggagcagcgaagcgcaagcgcccgtcctctgcctcgagctcgcttgcggccaagcgccctcggccgcggacgaagcaggcctcgtcgtcgtcgagcctcgccgtcaaggccgagcagttcgcttcgtcgtcgacagcgctcggccctacgccgccggtcgctcacccgcagcgaaggtcagcccgagggtcgatcccagcgcccttctcgccgccgccaaagccggccgcaccatcatcaccgcggccgccgccgtcgacgcgcaagcaggtggcggcgccggccccgccgcccaccgagcggccgccggccaagcgtgacagtgttcctcccgctcctcctgctcccgccatcgcagccgagcccttctcctcagccaacgcagctcttggtcctaccaggcggtcaacgccgccaccgtcggtgcctgtcccaccctctccggccgccacgaacaacaagaaggccagccggcactcgatcgcgtcgctcctctcggctccgcctctcgccccgactccagtgtcggtcgccaatcctccgcctccgcctccagcagcagcagcgcccctcgccccgccccctacagcggctgaggcagccgcaccgcgcttgaagttccggagcgagcccggtgtccagtggtcggcagggcgcgagacgtgtccgatgtgtcgcgactcgccgacgatcccggcaagcgcgcagccggcggtcgtcgctcctccgaacggagaggacttaacgatgactgaggcctcgacgaacgcgctcggtttctctgccggcccgccatcgtcgacagagcccgtcgctggcccttcgtcggccgcgcccgacctcattgtcgactcgtggctgagctgcgtcaagtgtcggtctcccttcgtcatccgccttcaccctcgtcctcactgacgtcctcgcccgcgcacgacaggcaagcgctggcaccactgggagtgcatccgttcgcgctatcccgagacactgcctgcaggcctgctcgcgctcggcttgccggacggcgaggctgcgaacaagatcgaccggtggtactgcgcgcaggcaaagtggtgcgctgtcttgacttcgcttggctctctttgcggacccctgcctgccgactgctgacgatcggccggctcttgacagctctgccggcaaggcgacgctcaagaaggagcccaaggagccaaagcgggcctcaagccggaccaagccgccgccgacgtacgcggcctcggacgacggcgactcgaatgcgccctcgccgacgctgccatcgtttgaccttcccgccgggccggccgtgccgatcccgactgccggcgacgagcacaactttcaccggcgcgtctcgcagtggcccgcgctctacaagacgtacgaggctcaggggcggatcatcgacggcggctaccggcggtgtttgcccgaagttgtcgtcgacgagtggaagcgcgaggacgacgacggctggcggcgaggcggtgggattgtcctcgtcgagaatgagcgttcgccgggcgggtcgagcgacgaggtcgagggtggcgagggcatcgcttttgagcggcttggcggccggctgccggaccgtaagctgacgatcgcagacgtcgcgcgcatcaacggtgcgttctctgcaggccgtctgtcgccctcgtccatcgctcggctgatgtcttgcaccttgacgttcaggcccagacaacgagattgaggtcctctcggtcgacactcagaaccgctcgtctgccgtccccggcacggctaatgagcgctggacgctcgctcactgggcccgctactacgcccacccggcgcccaaggtcctgttcaacatcatctcgtacgagattaccgggactacgctcgggcaggcgctcgagccgccgagggccgtcaaggagatcagctgggtcgaccggcattggcccggggcgagcgcaccgcagctgccgcccgtccaacgttacctgctcatgtcgcctgcaggtaccttcaccgtacgttccggccggacaatgctagcctgaggagttatcgctgacccgcccttctgcctctcgtcgcaggactggcacgtcgacatggctgctagttccgtctactaccacgtcgtccgcggcgaaaaagtcttttacttcagtgcgtcgtcccgaccacgtgcacatccccgagctaggtctgacgactcttcgctcggtctcagtccggccgacggtcaagcacctgacggcctaccggaagtgggcgtcgaccgaaaagcagacgatggagtggctcggcaactcggccgacgaggtctacaaggtcgtcgtcaagcccggtgcgaccgcgttcatccccgccggctggattcacgccgtcgtgcgccctccttcgctgccactcatacgcatgtcttagggcaggagtgctgactgttcgagccgcctcgcacctgcagtatacgccaaaggattcgctcgtctacggcggcaactttgtccatacgcttgccatcccgatgcgtgcgtcaaactggcagctctttcttgcgctcactagcctgactgggtcgcctttcctcccttctagagctgcgcgtttgcgagatcgaggtcgcacacggcgaggaggacgagcaccgcttcccctacttcatcatgtcagttgacacggacggcgcccacagtgctcgccctgctgacggacagcccatttccacccgcaggctctgttggttcgtcgccaaggactacacggcccatctcgcctcgctccaaaagctttcgtccaaggcgccgacgccgacgccgacgatgagcggacggtcgttcgaggcgttgacgccggccgtgctcgagtcgctgctcgcgctcgcccgcttcctctgcgactgggttgagcgacgcgtgcttaagcggctcaagggcagctggacgctcgccgacagcaaacagctcaagcgcgacgtctcgctcaaagaccccttttcgctcatctcggtccagctcgctaacgagttccggagccgcgtcgtcacgcagctcaaggcgcttggtcaggtcgccgacgagtcagcggccgacgtcgaggcgcgcgagacagagctcgcccggggcgctcagcaggctgctggctcatcgagcacggttgcacgccgggccaacggagtacaggagaaatccccacggattcaggggtacgtcccttgcgacctcgtagcctggtcttcatcccgatgctgaccctacctgaccgcgtttttcgcagactcgtccaaaactggaccgagcccgagtttctcatatacgcagcctcgcggcctcgcccgggggcgctcgccggtgcgcctagcgagccggccatgtgcaccgaagagaagcagcaccagttccagtatcagcggccgcagcaccggccagacggctcggccgtgctcgagtttgtcaccgcgacgcgcgtgcggtacgtgacgacctgggcgccgtcgtcactcccctcggcggcgccggcctcagaggccgccagctcggcgcctcctccaatttcggctctagcgccagtcgctccttcgacgatggcagactcggcccggttcagcgatgagcctatgtcatcggcatcgtcgctggccatgacgccgggtccgcactccacagccgcacctggtcaggctcctacgtggccgccacagcttgcttccgtggcgctttcgtctgccagtgccggatcagtggccatcaacggacatgccggtccgtcgtcggcgtccagcggcctcaccacctcagccacggctgccgtcggtggaccatcgcgtgctccgtcatctgcagtggcgaccgggccgcgcccgatcagctctatcgatggcgaaacctctcgcgcctacgagcgcttgaacggccatccgcggaatcttcctgtccacacgctggccgggccctcgcatgccctcaacacgtcgatcgcgtcctcgtcggcgagaccggtgaccagtcaggcccagccgagcgcagccagtagcaatttgccccacccggctcaggcggcggcggcttccgccaaccagcggctgactgctccgctacggctgccgccgaaccatcccaagccgtcacaggcgctctggcatccgccgatgctggaccaccgcccaatttcagatccgtcggtggccaggccgccatcgcagcagcgacagcagcagcggccgctcctcccgtccagtcgcgacctgtacccgacgggcgcggcgcccatcgcgccagctggcagcagcatccctcattcgacctcgagccacaccttgcagcagcaggtgtactacccgaccatctctcactctcccggcgcggcgttccaacccccgacctcgtcgtcgcattcgcggccaaacaccatctacacgtcctcgcacataccgcacggcagccggccgatcgcctccgggccttacgcggcgaacgtacggcgtccaccaacgactcagccgtcccagtcgtctgcgattcacgttgcgccgcacgacgctcctcggcggtcctccgtctcgccgccaaagccctacgctgcgcaggcggcgacatcctcagccggccctccctacgagccggccggctacccgtcgcgtctgccaccacccagtctgacgcacgactcaccctgcccggcctacagctctggagagcgcgtctgatggccgccccactccatgtcatgcattccttctgtcgccgaggcaggccgaagcgtttcagagtgaaaaaaggggtggcatcgtgtctttgtctccgagccagcgacttgcgcagccaatactgcctcccctttcacccctttgtcctctggcccatttgccatcgtttgctgacgccccacgccgacgcatcgcagcctgaggctccctttgttctcgcccgcagccgctgaaaagagtcggacgatggccagcaaacggcgggccatcgtctcttcccctccgactcccaccttgctctctcttttctctcccttccatcctttccttctccagcagcacggctcgacatcgcgtcctcttgaccttttcaatcccctcgcaagcgctggcgcctgcctccaccttccttttcatcttcaactcggccatgagcgcctcgctcctcctccctccgactgcgcccaggcggccaaccgggttcttcttcatcggcctcaacgtcgtccgcttcatcagtctcgtcagcctcgtcctcgtcgtcgcggcgacgatcacgcacatggtcggcgacttccgagcggtgcgtgacgcagaagctccggcaggcagggagcacgtgagctgacgctggcgtcctttctcccaggtcaatgcttggatcaaagccggctcgccctcctctggtttctcttcgcaagacatcgacgccgacgactgggactgtgacgtcatcgagaactcgtgtgcgtatttgagctcccttattttctccatcgtcctgccgagttgacctcgcgctgtgccctcccagcgatcccgaatcaggtcggcggcctattcttctcgacgatgagcaggctcgtcgtcctcttcgtctgctttgttctcttcctgagcgagctcggcggaccgcggatcgttcgcaaattcttcgagctgtcggtaacccttgtctctgcccgcttgagcgttaggcctaggctgaatcacatctgctctcgatcagcttcgttccgccgctcggaccaagccatggggtcgggacgctcggcttcatccagatcttgtacgtctggctttgcgaacgtctgcggatcacaagctaggctgacccgccatcctcgtccagtgtcgctgcgaccgtcctctctggctttgtgccgctcttcctccaggtctccggctggtttctcttcatcatcggctgccttcatctcgcgctggttagtggttgtacggcacgtctagcgacggcagagcgcaactgacttcgtcctttttgcgacgccagggcttcctcggcgccaaggtcaagacgtggcggcagatcttctcctttgagaacctgtcgactctcacaacacagacgccgacggcctactcggcttaccagacggcctcgaacagcgagaagctcgccggcctcaagacgcgcttcttcccgtcgtcggccggaagagcggcacgaccgacctccgcctcaggcggctacgccgacctcgagaaggagtttgctgagaaccctcgggtcggcaagatccctttcgtatcgtttggcggccgggcaccgtcggccaagccgaccgctgcttctgcaccgaatggcgtcgagggcgccggcttcggcggcttcggcaagcagggcgagcgcaaggccaagctcaagggctacttgatctctaagccccaggtcggcttcaccaagccctgatgctctttatctcatcgtcgtactccccttcacgcccatctctcacgcctgctctcacgacgactatcctttcggctctacctatccttaatctccccgctccctccttcccaaccggactttactctccctcagtcaccctgtcggtccaattatctgcgcatgcatctcatctgctctaccatatcgtttccctcctctgctcgatgctcgcccaagatgatcagcccgggtcgtcggtcgactttgatgcagctcgccaggactgctgcgcgggctgccttcacgcctccgagctcgagctgctcagcccgaccttttgacgacgagctcctccgaacttcgaccccactcttttgcctgcctcctagaccgctcgcttgctacagggcctcccttctcccacgctcgctttccgcctcttctctacctagaatgccgcccaaggcgaacgccaagtcggtgccggcgccgcccgtcgtcgacgagaagccgcccgagccgctccaggctgtcctgctcgccgattcgtacacgtcgacctttgcaccgctcacgctctcgcggccgcgatgccttctgccgctcgccaacgtcccgctcctcgcctggacgctcgagacgctctcgctcgccggcgtcaaggaggtctttgtcttctgcacgacaaaggcagagcaggtcaaggcctggctcgaggcctccgagtgggccgacggcggcatgcgcgtccacacgatcgtcggcagcaacgcgacttcaacgggcgacgtcctgcgcgagctcgacgtcatgggcgtcatcaagggtgactttatcctgatgaacggcgacgtcgtgagcaacctcgaccttcgcgacgccgtcgaggctcaccgcgagcgccgaaaagcgtcgaaggacgccatcatgacgatggtcctcaagaccgactcgctcggccggtcaatcaggtgcgctcaggctagagggcgggctgctgtcaggctggggaggagcaggcctcgcggttcagcttggttggcagctgatgccgctctccacacctcgcgccctgccctgccaggccgatcccgtcctcgtccgtctttgcgctgcacccagagtcacaccagctgctgcactatgtgccgacacccgcgctgccggtcaccaagcggattgcgatccccggctccgtctttgacaacaagtggggcgtcgaggagtgcgaggtccggggcgacctcgtcgactgcggtatcgacatctgctctgtcgatgtgcgtccaagggctggctcttactctgcggccggcagactgaacatgctccatcccggccgacgcagattcccccgctctttaccgagaactttgacttcctctcgccccggaccgacttcctgccgtcgatactgcactcggacctgaccaattcgaagatccacgtttacctgacgacctcgtacgcagcgcgggcacgcgatccgggagcgtacgacgcggtcagcaaggatgtgctcggccggtgggcttatccgcgcgtgccggacggccactggcccgtcggcgacgacggcaaggacggcgagtacgaggcccgaaagggcggcagctatgtcagccgctcagccgtgctctcacggacgtgtaccgtcggcccgcggacccttcttggcccgcacaccaaggtcctcgacggcgcctccgtccaaaactcgatcgtcggctcgagcgtaacgatccacccctcgagccgggtcgtggactcgtacatcttctcaggcgcggtcatcggccgcgggtgtgtcgtcgagggctcggtcgtcggctacggtgtcaccctcggtcagggcacgaaagtcggcaagggctgcctgattggcgacgacgtgacgactggcaagggtgccgacctcggcgagttccggcgcgtcggccgccgggcagagcgcgacgatgacgacgacgactcggacgacgaggaggacgaggaagaggaggacgacggcttcacgacaggttggtcaaggcgcagacgcttgagcgttggcgaacatcgcggctgaccttctgtttgcccgcacacagagcaacgcgacgccatcctcggcgtcggccacgccggctacatctggccgacactctcatcggccgatctcttggccgaggagtcggacgatgacgtctcgtccgacctcgaggacccgcttgcctacccgccaaatgcagctctgctccagctgcaccggacgacctcgcacatcggcctctcggactcgtcgtcgaccgtgtcgatgctgtcgcaggagtcgtccgagggctccttgcattctagcgcgtcgtcacatgcgagcgcgccgggcctctctcgagtgatggagcttggagacgagcccaagttccgggaggagtgtgcggcgacgctcctgcacgccttcgagaagggcggccaggtcgaccaggagagtctcgactttgctgcgcttcagattaagagcgctcgggcgacgaccaacgtcacgccaggcctcgtgcgcgagacggtgctcgcctacctggtgaaccgggtacagagcgcaaaggacggcaagccggcgcgcgaagtcctcaaggaggccgatgacctgtttgagatctggggtggcctgctcgagcgatttgccgaggaggtctcggagaaggtcgagatcctgcagatgctccaggtacgtcctttcgctcgcactctcgtcgttggctttagctgacccgcttgaccctccagcgcctgctgattgccgagccggcgctccagccgtactacgccgccttcctgacggcgctctacaatgccgacgtcgtcgagacggaggacctcgttgcctggtacaagcacctcggctcgcgcgacacgcccgagatggaacgtctggccaagctcgccggcggcttcgtcaagcaggcgatggagaacgaggagtcggacgacgaggaggacgagagcgaagaggacgagagcgactagcgatcgatgctcatttatagacggggcgcgggcgcagacgcatcaagagcaggttggaggacgtgggtaagaccgggatagttgtacagggaatgacaagtcggacaaacagacagtgatctgagtagatgcgagacggaggcgcagaggaaggatggtgaggtaggggggaagccaacagtaagagcgctgaggcgcttaccagctcgaacaggagctgcttcctccgcccatgtcgccgcaggagcctccgccgctgctaatgccgccgccgcttagagcgctgtgggtgacagacgaggtgttgaaaaggctgccgttgtaggcgctcgagcctgaggtgtgctggctggtgcgagcggcggcaggctggtgcggcttggctggaaccacgaccttaggcttcgggttgaccgggatctcaaccttgggcgtctgactgacggctggcaagcgaagagagagagcggacgtcagcggcaggcggtcaatgaacattcgaagagagagacgaacccggcttggcttcgacaacggtctcgacggccggctggaccgacatcgtcttcttgccggcagaggcgtgccgcttcttgaagagcttctcaaggaacattgctttagttggcttgaggtgtgggtgtgagtgtaagagcaggagggtggttcggttgttgtggatcgagaaggaaggtcagtgtcgggcgcctccattttgtggcctttctcaacatctcccttccgatggatcctgtgcatcccagaagatcagtgctgacgtctctcgaggcgataagcgatgcgtgtgacgtcgtcgaaagatggtggaagctggccctggccgaaacgatgccggctgatgcaatctgggggcggtcagtgcgctgctgcgcggccggccgggcgggtacggcggatgagtgcatcagcccgccagatgcgatccagactacgcgtcgtagccggcagacagagctccgccgttctatggttggcctctggcgcggccgggaaggcgtctccaacgccgccctcgatggcttgcctcgggcgttaccggcccgagcagctcacccccggcacccgcccgcaaacagcccggtccaccccgcctgcgacccaatcctctccggatgccgcggccgcgcacgtagcgaaaagggtccatcgtagccaagccgccagcggttgccgcctcagacctgcattggactcggcgctgccgccagccgctcgtcccgctccttctgccggagggcgacgcggacagccttgtcgtcctggtacttgtaccacatctccgacagatcgtggttgccgtggaatttccagccatcctcctaggagaggatgggagaagaaagaaaaagcgaaggggagggaggggggaggcgggggggggggggggggtgggggaggtgggggggggcgggggggggtggcgggctgctaattcaggacaccggacgagtgaggctaagagcagaaggagacgacgcaccgggcaagcatggtaggaaggatggcctgcgtcgtcaggacggtcgccttgacattctgtcagagcgagcagccgcgcttaatcagtttcgcccagcggttgggaaggtaaggggcaggacggacaatgtcgatgatgccgagcatctcgtccgtctcagtctcggaaaagtagacggggatgtcgtgcgacaggccggccgagttgactgcggaaggaccggctcagtcaggaatcggagagccgggttgtcaggccgagggagactgactgaggacggtgatctcaagctccttggcgaccgccttgagctcctcgaaggcctcgggcgtaggcttgccgaggtcgatgatgacctcgcggacctggaccttgtacttggactctgttggcgagcgcgagaggcttgcatcagtgccctgcggccgcagcgcggcccgagcgcatctgacgggcgccgatgaggcacgcactgagctcgtcgccgagggccgcgagcttagtctggctccggccgatgaggacgatgttgagacccgctttagccatctgcttggcgaactcgaggccgatgtcgccggtcgggccggtgatggctagcgggcagcgggcagcggttgaggcaaaggaaagtcagctccggccgccgctgcagctcagcgatcaatttgctatgcaacagagaggctacgcaccagcccaagctccctttccagcgccgtacttcttgagctgtcgaggcgaatgacgttggaggagtgtcagcatctagcaggaccggagtctgctcgaaggagaggcgctcacgctcttgccgggaatgacggtcagctcggcgacgagcttgacaaagtcatagaccgccgacatggcgacggccgcaccgatcgaggccgcgatggctgtcaggactagcagtcaagaaggagagacgacggtcgtcagcacggccgtcctgggcaggcgcgtccgtcgctggcggcgcgagaggtgagaaaggacggacgcgggtacttggtgctcgtcgcaaggatcgactcgtggatatgctcgagcatgatggcgaagattctgtgtgacgacgggcagatggagagctcgtcagcccagctagtggcatgctcaggcgatgtcgggctctcaccaggaggcgaggttcgggtcgacgtcggcaggcagctcgaaggacgcgactccgaacctggtcctcgacctcgaccttcgacagcagactggccctgatcctcctctgaaggtgctctcctgaaccccacgtcgacacctccgaaggtcgggatatatatccaggcaaagcagcaatgctccggattcctccggcaatccggccggtggtgccctatggcctcttcgctgcgagtgtcctcctcctgctctaccaccacctctcggagtccgtccggcagctccaggtcgaccagatcgccgcgctcgagcagaggccggtcgatggccgcttcccgagctggtacggccagcccgaggtcgtcggtccgagtccgtacgactgggaggctcgctgggaaccgaaggaggttgtcggcgcacggggcggccagggagggcgcaaacgtcgggtcctcttcctcaccggtgaggctctcttactaatgagctcgggcaagagcttgctgagactgcatactgacctttcggttcttcgacgacacttctgttgctcccctcagactaccacgattacctcgagcggatggagtgcgtaggcttctccggcgcactcctcaagcagcagcatcgagagctgatcatcacgacacctcttcttgttggtcgctgatctagcacggtcatctttgaggtcgtcgacgctgcccttcggcatccggccctgctgcctgtcgtctggggaccaggctggaaaggctgggactcgagcaagtcggtcagcgctaacatcaacgccaagtggggcgcctgcggctactttgacgtgatgtggacgtttgcctggttgctcaagagtacgtcttggtcttctcgggcgcatccgggcagtcgacgaaggagtatccggtcgagaggccgacctgacctcgttgctgcgcgccgccgcttgcccttgccatcatccctgcagaggaggacccgctcatggacgcgcccggatgcgagacgctcttcatccaccagctcggcgactgtcacgatggcacgcctgatgggtcgtgcatgcaggtccgtcacagacgcaggccagaccccccgagagcttgtctgacgacgcctgtgcccctcgcaggactggttcccgtatcagtccaatattacgctctcgcgctatgcctttgagctttctgaagtcttcacgcacgagcgcatcatgaaaaagtttcccggcatggcgatgcacctcttcgcccacagcccggacgcggtgcgtctcgagggttccttgcagctggaacgcgaacgggcggctgactcagactctctcaggccaacccgtgggacttctacccgctcaaagactggaagcacaagaagcgcgacgctgtcctctttgggtcagacttgctccttagcctgcgcctcaagagatgcccgacttttgactgacgagcaacctccatgccgtgcgttagattcgagggcgacttctatccgctccggacgaccgtctctcgcgccatccaagatcacaagacgtccatcgttgttcgccatcctcaccctggtccgtttgcgcaatccgagtcgcgccctgcctgctgctcatcggctgactccctcctccgtatcgctcacacttgcgcaggctatggcgtctcgtatcccgactctgccatgactcatccggaagagtcgtacgacgtcatgtcgccgctgcacgcgagccatcgggcgatccgggccgactttgcgaggggcatgcgcgaggccaagatctgtgtcgttcgtcgttccacccctatatgcagcggtaatcatagactgacgcacaccctgcctctcctccccgccgtgcagtttgactcgagcgtcgagcgcaagatgatcaggaagtcggtcactccaattggtctcctcttttgccagcttcctcgacgctgacagaccgcttctccctgccttgccaggtatgcccaagcgatgctgaggtgagcgacaacgttggctgggccgcctagtcttatcggaaaggaaggctgacgtcgcccttcgctgccgcccgacagtggctgcgtcatcgctggcgacgttccgaccgagatggaggtcgaactcaagtcgttcatggtcgtcctgcagccctggtggtcaatcgaggtccgtccgccgaggcaaacgtgtgaagctcctcaaatctgacgcctctttccttgcgcgcccgcagcaaatcgacgaggcgattgcggccgccctcagggacccggctgagctccagcgcaaggcgctcatggcttttgcgtttgctcgaacgcacctgaccaacctgcgcaaggtcgacaaggccgtcatgccgcacggctttgcgggagactacagccgcggcgagcggggctacaagtttccttacggcttcagcatgcgctgccggtcttattggaacagcgctggggggttccgaccgccgtggtgcggcaaccgactgctcggcctcgagggacccgagtcttacgccgtctaaacggcgaaggccacatagatgcgctgcgggatggaaatcgatccatgcgttggaccttagacgtcttccgacgggccggttggtcaggttccgagatccttttgataaacaattagtggcgagaagatgtgtgtgtgtgtggacaacaacggaggagttggtacaggtcgtgcggcacaaggtccggggcaaaggaggcgatggagacaagggatgttgtgcagattaaaaggcgctgctctctggagaggaaggaggcaaatgaggctggggtcagcagccaatccaaggcgaggcaaggcggggccatgaccgacctccattcgggccgagcatccagtcgaggtcggggagcgacaggatctggctcatgaggtcgctgcgagggatggtggatgaaggtcaactatcgtccctcgcaactcctttcatgacggatcggcccactcacttgtcgacgaacgaagcgtcgttgggcgggatgccgacctcggtgtttgtctgaccgccaaacgtgccaaagccgaggttgtttgagctgaagaagtcgctgccgtcgccccagccgccgaacgtcgccgctgcggtcgaggggtcgaagccgcccgggccaatcgcttgcggctgagtcggcaggtattgcggcggcggcatgtcagtcgatgcggggttgcgggaggatgcgcccgactgctgttgctgctgctgctgctgcggttgcagctgggtgcccggcaggtcggccggcagcgactgcgacatctggtggagagccggccgcgtgccgttggtcttgcccgtggcctcaaccggcgtctttgttggcggcgaacggagtgagcttgtggcgctcggcgtgccagcgacagtcgcagcagctccgatagcttgccttgccagagcaagggtcggagcgggcgaggcgccgttgacggccgggctcggcgtgtcgaccgcagcgggcatcggcgacgtggcgacgccgttcgtctgcacgagccgccggaccgcccgctggaggccgccgctttgcgagtccggatctgagccagaggacatcgtatcgaacgacatcttccggatcggccggtcggccgtgttggccggccgcgtcgttgcttcggcgagcagcgtctcgatgaccttgacggacccccgggccggcgatgagtagcgctcgatgttcctgaatcgaacggaaggtcgacgacggcaaacgtcagcatgcgaatacaacgtttggggaagcagtggtcgtacttcagatacttgagaccttggtagacctcctgcagcttggcgtcccactcggcgtcgcggaaggtgtgcaagaggtcgatgcagaggacgcaggaggcgaagactgcaggtaagcagcagaggtcagcacaggtcagcgcaagggaagatcgattagaagatagaaacacacaggtgtagaggacagggatcctacaaacgagcgtgattgagtgtcagcctggtgaagggagccgctaagcccgacagagtacgcaccaccaccgctcgaagaacgtcgccgactgcgaagtgccgacgccgtcgcggacaatggcgatcgactcgcgcgccgcccggacacactgctgctgcgaatagaggtacttgcggttcgtgtagcctcggctgaggaatggccggtgcagccgcatccaccgtgtctgcagcgagaggttcgagatgacgcgctcccagtgcttgacgagcttctcgtcgctgatgtcgtcccctggcggctcgagcggccgctccttagagattttgaagtactcgggcatctgcgaggcaagcgagagtgagctcggtcgagcgaaagggttgactgaaaggggacagcgacgcacctcctggccaatcttcttgaactcggcgtcgatcgcgagcaccatgtcgtacggcggatgcggcgaggtgttcataaggacgataatctggtaagacgtccggcacagccggaggcgcatcaggtggtacgacataggctgcggtgcgaggaagagcggcatcagcgtgagggctgctgcaagcactgcatttgttgacggaagacgcacagtgtggacctccttgggctgcggctgcaacggcttgccgtcgacaatgtcctcgtcctggacgttagccggtagcgagcaagatatctgctcggggtgaatcgtgcaagagtagccgtaggccgaggccagcgaccagtcgagaaagacgagcctgcagaacggaggcgcgtcagcaaagcgactgaagtagccatcaggggcacgtgagcacgtctactcactgccaccagacccgccgggccgtctctcgcgtaacgacgctctcccaacgaccgacccactgcttcggctgctcgccttcgggcacgatgagctgctccggtccgagtcgattgaggcccatcatgtgcgcaatcttgatgccggcaccgaggatgccccactgggcgtctgcccggtcttgattgatctgcaaggaggcaaggaagggtccggtcagtcgccagcccgtcgcgggaggactcgaggagggggaaactcactacataaacgccgcagaggacgatcacttgaaggttctcgagcgagtggttcgtcaagaagtcgctctgccagagcgcgcctcgcgtcgcagagtaccagatagagggcagcctggtcagaagggaggcttcatcagcttgtaaacgagacagtcgatcgacgagctgaatagctacgcacgtgacctcgtcctccttcgagaagccggcggcggccgcggctgcgaaagagttgcgacacagagtcagcgttggttggcgcagacacagcaggacaggcggcagaaaacgcactctcagagtccatgaagttgaggctcaactggcaaaagcgaggcaggaggcgatcagtccacatgaggtggcgcgaggtgcgaaccagctggcttgacgcacgcaaagcagcatttgcagcaggccgacccagctcggcgagcagacgagggcgcgacgctcgcgcgggatcgcccaaaactcctcgcactggcgcatgatcgtcggccggtctgtacacgggagggagggtcagcttgacgggcagggcgaaggagcgagcgagcacagagcgggcggacggacggagacaatgatggaaccattcgaccttggcaaagtactacgaggcagatcgtcaggtcagctcgaatggaatggcgtccagtaacaagagggcgccacgcacatgcgtgatcaggatgcgctccttagcctcgccgggcagacagctgaggaaggcctccataaacaggtcggaccgctggaagaaaacgtcaaagacgcccttgaagccatccttgccgtcggccataatcttgagcatctcgtcccacttgcccttgggcgccgtgctcgggaggttgtcgtccgtcccatccggactcgagtttgcgagcccagcagcgacggcgaccggtccgccgaccgaggccgccggcgtcttctggcccatggcgacgagcgactggtggttgaggagcgtcgcgttcatcgagcccgccgtcgccgccgcgttcgagaggagaccggcgtcagacgggccgccaatgatagacggcaggagcttgggcgcgttctgcggcgaagtgatccgcggcaggtcgttcatgtacgacgtcggcgaggagagcatcggccgatggtgggcagacatgtttgggagcggcaggaccggccgggtcggcgagcgagccgaggcggcctgcaccggctgagggttctcccggcgacggccaaaagcgaggtgctatcaggcgaagaagagacagtcagcgctggtggacaaaagctccagcagaaaagcaggaccaacctcgagcgtctgcgcagcgtcctcggtctccgagtcgaggccgccctcgggcgactcgtcagtctcgacggcagcggcatcgggctcgtcgccgtccgagacatgggccgtcgatggccggcttgccttcttggctgacgaaggcgtcttggtgcccgccttgggttgcgcgagcttgcgcttcttgcccttgcgagcgctccctggcgcagcatcctcgtcggccgcttcagctgcaccgctcccgctagaagcaggattaaaatcgcgctcccagacggttggcgagccctcgccggtgcctccctcgcggaagccagcggcccactgctccttgaggccgtcgccgatccggcctttaccgcccgacacccggtcgacctcccccgtcccgaggaagccttttgactggaggaggccctcgaggcttgcgacacggtgcgtgagcgcgagcaggtcgcccgaggtcgcgcacccggtcgaggtcggaatgtgcttctcaacctcgcggcagatggccgagtcgccgcgctgccggcagggcgtacacggaaagacgcgatcgcaccgaattttgcgccgccggcactcggagcacgactggacggcccgcttggccgatttggcgtttgaccgcgacgactcggcgccgtggccgccgccggtgtggctcgtcccgtgcgaggacgcggccgagcccgggcgtgaaggtggctcgtggatggcgccgtggcccatcgactggatcggcgtcggcgggacgtcttccagcttgatgactgagccctcgcggggctgttggaacggctgatgctgattgggcggctgtggcagctgctggaggggctgatgcgggtgctgctgctgctgctgctgctgatgcggcgtcagctgctgctgggcctgctgctgctgctgaaagtgctgagccgcctgctgctgctgctgctgttgctgatggtgctgctgctgctgcaactgctgctgacgcagatactgctggtgttgctggtgctgttgctgcgaggcgtaagccggctgctggtgttgctgctgctgcagatggtggcccggatgcggctggaagccgccctcgcctccgggcccaccaacaggagggccttggccaaagtaacggcttccacctggctgctgctgctgctgctgctgatggtctccgaccggcatcatgccgtagacgccagactgaggcgagccagcccggtaggcgtgaaactgcggggtcgggtggcctcctccgccggcgccgccgccaaagtgggcctggccctgctgcatcgagtgcccgttcgcaggaatgtgtagcgccggctggttgaacgaactggcgagggcctgcgagggagccgtctgctggaggtgctgctgctgctgaccgagctggccgctggaaccgcctgcgccatcgaacgggccacgctggtccatcgtcggaaacggcgaccgaggcgcctctgctttgcgcgagccgggcaagtggaggacgctgaggctgctggtactgtcctcgaaggagaggggattggagactgaagcagagaagggctaggcgttggttcgtgatggatcgcagggagagaaggtgcccttccctgctgccttgccctgctctgcccacgcggccgccgcggcgtgcgcgcggacacaagcccggcgaggccgccatcggatgcaccgtaccctgcctgcgaaggccgtcatacttgtctcgctcgctcgctgcataaaaaggtgtcatggctaaggggaagaacgggagaaagaaagcagagtagacggggcgtggatgggagaaagaaggaatcgcagacgggacaaagcaaaggaagctggaaaggggtggaggaaacgaggacgacgggaagcgacggtcctccgttgatacatttgaacggtcagactccgtaagaggagggccggtagattatgtgtgacgaaagccatgaagggcccccctttttcagaaggcggcagggccaaggacacgggcgacctcggcggcggcagcggggtcggcgccggtcgtgtaaaagacgggcgacttcatgaagctgaagtgcagggcaggagggaggcgatcagcaggagatctttgtcaaattggagaaaggtgggggaacgcacccgttgaacgtgctggcggcacagatcgtgtaggcgcccatctcgccccagccgagccagtcgccgacctcgagcgccttgggcaggacgacgacgttgcggacgcagtcgattgagtcgcacgtcggcccccagatcgaggcgagctcggcccggccgcgcggggccgcatagcccatctggaccgtcaggtcctcctcgagctggatgtttggcgggaaggcggccgggaacgggcacgtctgggcgccgccgccgagcgtgagcgggaacgggtggacaatctggtggtcgaacataatgcagttgaacgagccgtagacgccgtcgttgatgtagtctgtgaagcaggaggagaaaggcaaggagcggtgtcagaccgtctgctgataacaatcggtcgaggcggttcggcgcgctgactcacacatgaccttcggcgtgtcctcctcctcgaggccggcgtcgccaaggtgcatgctgccctcgagcgagccgtcgagcgagacaatcgagctcgccatccggtccgagatgaccatctcgtcgtcggtatctggcgtgtttgcccgcggccacgtctggtcggccggccggagcgcggtcgccgccgccgctcggcgcgcgacgacgttggtcgcgagcgtaaaggccgtgctaacgaggaagcggcctggctcgccaatgacgcggacgccgtcggccgccgggaagtggcgctcgagcgcgacgttgaggacgcgggccatctcgacaaagttttccttctcgaagccgccgcctacgtcgaggagcgagaagcggtagccgacctcgcggcccatgtcaaagacggcgcgcgcgcgcgagatggcgtcgtcaaacatctgggggtccttgcagcccgagccgacgtggaacgagacgccgacgacgtcgagcccgagcgaccgggcgagcgtcaggagcgcccggcacgtgtcgagcggggccccaaacttgaggccgagccggcaaagcgactttgagtcgtcagtcaggatccggaggacgagcttggcggccgggtgcaggcgggcaatcttgatgagctcgtccgtgttgtcaaacgtcatggcgtcgaccttaagctcgcgcgcgtgccggatgaagctcgccggcttgcacggattggcaaagataatcgagtcgggcgacggcgcgttcgggagcgagaggacgttgctgatctcggcgtacgaggcacagtcaaagcccgtaccgagaagcgagagcagatggagcacaaccgggtccgggttgcacttgacggctgcggtagtgacgttggaggtcagtcaaaacccaggcaccatgagacgtcgcaaaggcacgggacacgaaccgtagaagagctcgacgcgcgggagacagtcgcgccagagcttccaagccttgaagacctcgccgaggtcggccgcaaagaaggcaccctcctcctcgccgcgaagagcgagctcgcgaatccggccgtggacgagttcctcaggtgtgccagtcgcgacgggcgggatcgcgagcttcgggaaggggaaggtcgcgagccgcgacggaggcgacgacgacggcggcgtcaggaggcacgactcctttttgagcgtgctcgagaggaggtcctcagccggcccgccgcatcggtcctggtggaggaacgagggcgagtactcggaggacggggtggcgatcggcgtcgggagggcgacgggagaggggtaggcgacgggtccttccatcggttttacgggctcggcggcaggaggggaaaaaaggacgggacgaagggttgacgagggctggctagatgtgtgttttgaccggtgttgggggagtaagcggtgctagggtggctcacctgaaagagaccaagagacagaggcacggcagccggtcagcgaaaaacggtcgcacagggtgtgacagaagggccgcccaacgaaccgcggacctgcgaccacctgtgcagacgaagcagacagggagaggaagaagacggaattgtcagcacgagctgctctgggcaacgctctaccgaaggcaagccggcggcggcgacgacccagggcaggagctcgggcgggacgcactcgaggttgaggaggcgaaggtcttcctgcctctgatccgaggaaatgttgacttgctctgctgctagaaggctctgagtaggacgccgaagatggggttccactgagagtctaaaggactgttggcgtgtgtgaggaaagtcgaggacgaggctgttcggagggaggaagctgttgcttgcagggtgaaaaagactcgaccttcgccgcccgacgaaagcgcggaggggcgacgacgccgatcggaaatcgtagaggggccttgtgtccggatagcttccttcctcgatggattcgccccataaagaggatgtaggccagcgtgaaagcagtgtctactcaacgaccctttctcctctccctcaagcctctgagaggccgggctggcaaaggctgcaggcgacaggtctctcgccgctctcttgcgcgcgcagtcgctgcgtcatgcgcggggtcagacgcgagccggccctcgaccagcagcagacgacgacctccatcgcattagtcgacgtccctcttgaccggctgcggttccgtagagggtcggtgtactccggcaaagtgctctgaccagggcgctctctgattcaagattaaggtcggcggtcggaggccaaactgagcgacgggcggcggtgggcgcaggcctcacagggtcgcccaagaccggccacccaggccagggccaagcattgcggcatggttatctttgtgcgcgtcgacgagatgtgcctggacgtgatacattcgtcaacgacagctacaagagatggcagccttccggcgcaagcgacggcctccgacgcttctgcccagcgggcgtctcgaggcgccccgtgttggtcctgcgaccgatccttctgtcgtcgtcgctcaatcggagagaccgtctcgtttatgaggtcaaggaactggatcgatgacccttatttctcctcaatgatgggccgagcgaaggctgccaaggtcgtgctcagccattgagaagcagagctcggcgcagtcacaagccgtggccgtggctgctcaagtcggccggcaagaggcgtcgtctctcttctgtcggccgtacgggctaagtgcgcaagaacttgtgacacgcaaggctcgaggcctcataggccgtgtttcgagtgatgcagcgaggccctcggctgcagccgattctgtggcgttctgcgacgacgcgcatcggttgagctcgacgacaggacgcgtctcgacggtagactgccatcatttcgacctcgacctcatctcctcaggcaggacagacgtcgctcctatcgacgtcgtctctcaccctcccggtcgacccggcttccctcgctcgccaacctcgccagaacgtcgcgtcgcgtccctctccgcccagcatcccaatggcctcgctcgtctcctcttcggtcgccctcctcgccgtccgagcgggcctcttcttcgcctcgcgccgctttctcacaaactcgctcaacgccatctcgctcgcgggcgttggatcaagcgcgccggaggggctcgacgggggtacgtccgcccgcccgcctagtcgctcgagcgtgcccgacgacgagagcaagaggtgccaaagctgatcacatcggctgctggctggcctatttgctgaagcggatgactcgggtcaggcttcgcctctgctgcctctcttgcgcaacccctcggccccagcgctcgccatcctgaacagcagcagcagcaacggagcgacctccgcagcagccggcggcggttccgaccagcagcagcagcgcgagcccttcgcccgccagcactcggacggcaacctcaccgcgctcagtctcgcccggcaggggagctcgagcggtatcgactcatcaagaggaggacgctggtttgacaggcggaggagcagcagcagcggccagaggctcagcgccgacaacggcgagaggcgtctccgggcatccaacacgtcccagtccgtgctcgccccagtcccgccgtctgatccctcgctttctcggcagcgtgctgacatcatcgaaaactcacaggctcatcttcccgctcctcttctccgagtcgctcctcctttacctgctcgtcctctgccagtcgctagcgctcctgcccgcgcgcgcgcgcgagatccactggtcgatctcgctctgggcgctcgtcctcttgctcgtcggtgtcgtccccggcgtccaaggctgggtgctcttgcgcggaacgaagagtgcgtccgctccttgaaggggcctcggtctctgtatggcctgttgaaggcccgactgacggacaatgtccgctcgccttgcagagcgtgggacgccgactcggctcgctcttacggccatcccgttctgcatcatgcagactctcttctacctcgtgcccttcccggcgcacatgctgcacgaggcctcagccagtgcgtctcagccatgcggcatgctgaggccttcacgagtgccggcacactgaccgtgcgcccccccccccccccccccccccccccctcccccccccccccccccccccccccccccccccccccccccccccccccccccccccccccccccccccccccccccccccccccccccccccccccccccccggcgggggaccgacagagcttctcgtagccctgcttcttccactttgcaaccaggctggaaacgaggcagcaagtgggagggtcagtccgagatgagcgaaaattatgctagggaagaagggcgggacgcactttgcatcggcgtactgctccttcagcagccagtcgtagagatctttcgagatggcctcgcgcttgtagtagaggtcgtagatgtagcgcgagcgtgtgtgcgagatcttggtctgtgagagggcggatgcgcacgcaagagggcggaaagagacgggccgaggccggtcagcatgccgggtcgttcggggcctctggcagctgcggaggtgttcgccgacgaagagcaggcgggacgaggcgacgcacgatgttccatgtcgactcgaccttgcgcttgccctcgtgcggctcgttctcggcgtcgcgcatcttgcgcgcatagtcctcgaggacgggcgcaatctcctcgtagccctccggagggggcttcgtccgcgacgtcttgatcttgggcatggcggggctgctggtttggaggcggcgctctggtctgaagagggcacggggtgcgtcagcgatcgggcgtcgcgatattagggataggtaatgtctgtacgcacgctctagcggtgcagaagagaggcaggagcaggcaaaggacggaagggttcgaggtcaagctgggtcgagctgaggcgacgacgcgcaaagccggcgcaaggtcagcgactcgtcctccagcttttggctagctcagcaaccatatcgaggccagacgaaccggcttcaggaaccttgggctgacctgtaaagtgcggagggttgagggtcgtgctggcgaggcgggatggaggttaggcgggaggcgtcggctcgagctgtctgcgttgctggccttgctgctcgcgagcggacgagctgcgtgctcgacgtcgaccagcatcgcaaccccatcgcctcgagcaagcccatctcgcagcctactcgttcgacagccgcaccaaggagccgagcaggacatacagctagcttaccgggacgacgcagcgactcggggaggccgccctgccctcttcagccctcctgcgcctctgaggcggctccgggagcgatctatcaagctaggagctcgccctcctgtcgaccttccctcctgccttgtaggtcagtcagaccagggctggaccttgtctgaccggacggctgacctgaaccttccgcatttaaagccgccgctggacggtcgcgctgccatgtcgtccctctcccctctcacgtcggccccgactccgccccgggccgcccactcgcgcctgcgctcgacgaccatctcgtcgctcactggcggagggccctcgcacccgccgccgccagcgtcgacctcatcggcgcccgaccactcgccgaccgtccggctgacgtgttgggcccacaaggacggcgacaagctcccgctcgtcgtcctcaacccaaagtcgttcccgtacgccaaggacggcgacattgtccgcatccgccagctcgacgggccgagcttggggtcatcgtcggccgaccgcaagagcaagaagctaatgagcggcggcatgctcttcaaatatggcgaggctgacattgccaagattgacaacgctcggctcaaggtgcgctgcgcccctgctcagcgacgctcgccgccgaggacgaccttcttcggctgaccctctcccgacacccttcgctcgcagctatccatccgagagagcgctgttgtggcctttggattcaaagccgataccgcgacgcttcagctcgacgtcgtatggccgtccgctcgtgccgcacggacgcagtctgagcaacgtactgacatctttgcctccgcctgcttccaggttgaccgcgaggaggtgaccgccgactttatcgagcttttcttcaaggatcagtacatcggccggtccgacatgtggcgcctcggctgcagtctcgaggactcgtgtatctacaccggccaggaggtgcgcgggtcgccgccgcactctgtgtcgcgcaatacaagacagctgactgcgaccacgcctgccagatcacctttgctggcgtcgtcaaggccgaggtccgcaacatctatgtcggcggcgagcgcgtctcgtcctcgtactttaccgcccggacaaagaccatcttccgctcggcctcggccaagtactttgtctttattcaggtctgccgcgagacgtacgagttcgacgaggacggcgagcgctactacgaaaaggccatggacggcttcctgcccgagctctttgagcgctggcaggccctcaaggccaaccacgttgtcacgatcgtcctctttggccgcgtctcgtatgacccgtccgagattgacctcatctcgcccgagtgcctcaagcacaacgaggaggtcggctggtacaaggactttgtcggtccccctcttctattgtgcggcgttcagaaagcgctgacaccctccgtcgtccttcccgcagtacaaggtttgctttgacatggagacaatcctcgacgcccgcgtcatcatcaacaggctcaagattgagctcgccaactttcgcaagattgtcctcctcgaccaccaccacaagcccggaacaaaggccgtcatcccgggcttcctgacgtttgcctatcagggcaacgtgctcgaggcgatcaacctcgcactcaacccttacgaccggcaccatctcgaccgcgactttgtccggaccggactctgcctgacgctcattacgccaggcaccggctatttcaaggtcgacaagcagtgcgtttcagtaacgctgttcatttcgacatcccgactgacgaaacctgcgcccacccagcctcctgcgactcacgactgagcgctgtaacgatcatggcctcggactcgacctcgtctgcctcaacaagatgccgctccactcggtgccgctttttggctacttgtcggctaacccggacctcgaggccgagacgccgggctcgtcaggcgtcatcgcaaaggacgggaacggtcggcagccgccgctgagctcgtcaaccggcaacaaggaggccggctcgtcactcaaggatccgctctactacgacccaccgacgtacgccggcacgagcgagctccgcgttttttactcggttgtcttctggtgcgtctcgtccgcgcgtcgcctatactccaacgccagctgataggcggcaatgtgtcggctcccccagggtctactgcagcttctggtcaaagagtagcgataaaaagtatcgcaaaggcatgttcttcccgcgtgtcaagatgagcaacatacaaagcctcggcgtcctcaaccacgacctgtcgacgatcgtcctgccgctcctccgccagcgcgacggcgtcggcggtcagagccgcgaggagcgcaaggccctgcgtgaggcgcatgacgcccgcgtctttgcccacgtcgagccggccgatcagctcgacgacgcagcgacgagcatgtattcggcctcgaccaagatgacgacggccggcggctcggtctcgtctcgcggcacgctcgggctctctcagaatacccagacgttcttgtcgtcctcgtaccggtcggtccatagtacgggcggctcgtccttccccaagccgggctcgctccgggaccggctgctgcttgaatcggcgagcaccgcccggccgacacccggcgcgggcttctcgacgtcgtttggccgaacgagtcccgtcaagccgaaagcgcgcaagctgccgccgacggacgagaccgaggagccagctatctttcacaagcgtgaggtcccgcgctcaaaccagtcgtccttctcgggtggcgtccggccgctccagttctcgtccaacctctcgcagcggctgcagccggcaccggtacccgtccgcaacgcctcggtcacctcgatcgtcacgagcgggaccgttacccctcgctctcacgacacggccgccagtacggcctcgcccgcccggctctcgatcgacgccctcgcgtccgtcatcaagccgccgccagtcaaggagcccttctttgccaagctcggatccaagctgctctatcccttttatgcgccgcgcgcaccgacaccgccaacctcatcggctgcctcggtcgccaattcgaccccgccagcgacgccagtcacgccaaactcgccgctagcatcgggacccttcagtccggcgccgccgacagtctcgtccctctcaaaggcgtcgcccgagcaagcccagcccatcttgatgcccatcggcggccaagtgtccgcgcgacattctatcaagggcgagtcgcctcagaactcgttctctgacgtcgttcttcccagttccggcgtggcgggtagctcgccagaactggacatgcgtctccgctacggcgccggtgccgcgccacgatggcaacgcgtcgtcaacccctgttcgtcccttcgctggggttgggttcgaccaaagctggttgcgctgatgccccaccccctgcttgaatccacaggcaatccatcggccagccagatgatggcccgtgacggcagccagcgctggcagcacatcctcccccgcgcggtcaacctgcaccgggtcaagtggaagtcgctcacgacggtgcgtttctcggcgcttggggggccctgtctgacgtgatactaactggcgatccactatcccctcgcagcctgcctgcctgccgatcacgacgcactacctgccgccgcagactgagctcagctcgcgaaatctctacactctgaagagcatcgaggtgagcgcgcttccctgttcaccttctgactctatgtttcgtcgctgaccccggtccgctcgcagtatccgatggccgagttcgacgagagctccttcatcctgccctcggccgacggaaacgttgataagcgctccgtcgtcaaggagatggcgatgcagcggtgcgcgtttcctgggctagactgagtcttgcgatgcacctgctgacaaccttccgcctctgcagactcgctcagggcttccaagtcatcgtcgcagaggaggacacgccggcgcccgagccggccgagctgacgatcatcaccaaccttgcgtcgcaaccgctgccggtgaccaagacggcgcatgtcccgaaaaggccgctgcccggaggagcctctgaagccctgcgttcgtccgaaggctcaatcttcatggttagtgctggtagctaccccttgcagtcaacattcgattctgactgccgcgacttctctccttcgcagagcctctcgaaccagatccaccgcctcgactacaagaaggagagtgacaccgttaccgtccgtcagtacacgcgggtgtcaaagtactcgacggccgagatcccgtatgagggcctcgtctggtcaagcatggcctctggcttccgcaagaccgaggccaccttcaactttcctgtgcgtcggccctgcctctgcgtccatcctgggcgagctgctgctgacagtccgtctctgtgattcagtcgacccgctgggaaacgttccgctggaacaaactcgacgacctcgtcactggcttgagcaccgacatggactcgatcggctcggcttggcgcgcacgtttcatcctcgtcccgtccgagcaggacccggcctcgatcatcaccaacaacgagacgctctcgaacgaggaggtcggccttgaagaagctcgctgtcgctcaaacacggcagggaaggctgactttttacctccgctgcgcaggtgcacatcgagggcgcgcgcatcctcgtcgaccagttcaatcgcgcgcgctacaagccgccatccgagcaagagaacattgccgcgctcgagcccatccgcctgattctctcgacgctcgacccgtcgcagagcgtccaagatgaggccgtcagcaagcagctgcgcgacctgcaaaatcggcgccgagtcggtaagaactacctgacgatcggcaagatgtcgctcgccgagatcaacacggccctcattgaccccaagtcgggcctcggtctcggcgagcacatgtggggcttgcgtcgatacgtgcgtttgcgtcagcttcgcctgctgtgcgctggaccgggctaatccgctttgatcgccgtcgcagcccaactcatttacgagtgacgccctcgtcgactggctgtgtgtcttctctgattcctgccttgattgctcgtcacttttgctgatcgagaatgcctgtcgctcgtttcgccgcccaggtacaagtcatgccgcgacatcaagacggtcgaccaggcagtcacgtgcgctaagaggctctacgacgacggactcttcaagcacatgaccggccagcacaagttcattcacggcacgtacatctaccagttctgcccgccgtacggcccggccgccgtcaaatcgtcaggcggctggttttcctctcgccgcgggactgagaaggccaaggctgccgcagccgagcggccgcttgactcgccgacctcggagaatgcacctcggaagcgccggcgtgtcgcccggtcgaacgaggtcatcatcgacctcgacccacaccgcgtgagcgaccgggccgagacggcgaccctgcggcatgatctgctctacaacgagtacgtcctcttcttccgctttgatgagcaccggatgctgacccgacgtgccccgcgccgtgcaccgtccacctcttcaggaagaacggcttcaatttcgagttcatggcacgtcgagactcagccagccgcttctctgctgtttcacccggctgacctcgcgtcctcatgcctttcttcagtggctcggcatcaccgctggcctcgccgaaaacctgcgcaagcagtggagcgaaaaagtctggcggtacggcctgcgcatcgttgaggcgcccgtctaccagatctcgaccatctcgtcgcgctcggcgttccgcgcaccgctgcacgtgcagctcgccctccagccgccagactcgtccgacttcgatcccaacttgagcggcgaccagcggccggtcagctacttttacgaggccgccttcctcaaccagcaaggcttcgtgctcgacgtgcgtcgccgtgcggtccccttctccctctgcgcatcgcttctgacgccagccgcctacctacagttcgagtcggacaagaactttccgcccgaggtcgactatcagtacccgggcaagccctactatgactactcgcaattcgttcatcgtgagtcctttcctcgacctgattgctgaggctgcctcgcgagactaacggagcctcgctcgctcgctcgctccagggtccggtctcgcctttgtccagaacctcggcgatggcaagggcttcctctggcttaacaactcgctctactcggacaccaagcgcgacctcaagaatgcccagggactctcgatcaaggcgcgcgagcgcgcactgcgcgagaagtttgtcgccacctgctccttggaggacgcgttgcgtgagagctacaagacggccagactcgcccgcgagcgcgactttgagctgatggagctcaccgcctcgggcgcggctggcatgaccaagacgctctcgaccctgtcgggcacgagctcacatgtgacgggtgcgtctggcgaggccggcgtcgacggtggccccgtcagcacacttgacctgccgcctccaccgacacccgggcccgtcagcggcacgctactcagcccgccgcacagccagcccctgccggacccgccggccccgcatccctagtcctcagctatctcacatcatgacatctttcccttgcttgtactgccttctcgacgaccgacgcatgacccttcacgagcgacgttcggaagcgaaggctgtcgacggtggccagctcgcatgcatgcgtcacggcgtgcgtcgccgcagcaggcccggccgacgcagcaaggcgaaagcgaggcggttgaagatggaaggcctccgtcctgtcaaaccaccaccctccgccagccagatgtcgtcctcctctgcccaggttccgccgccgctgccagctcgcaagacgctctacgaggcatcgccgcacgcacctcccccgccgccgcctcccctgccgccggcggacgactcgcccgacgcaatctccatctgggcctactcgacggcggccacgctctcgggcctcgccctgccgcttcttctgtttccgcgcttccttgccttcctcgccggcggcttcgaggacggccggccgaatggagggagcccgcgtgagggctggagcggtcgcaacgccgagctctctggcctggagacgttcctggcggcccagcttggcgtcttgtgcgtcacgacctggccttgatctgacccttgcccgatcttcagctgatccaacctgcccgcccacaggctcttcggcttcgctatcgtcgttctggtccttgtgggtggcctgctctcctaaccccggtcgagctcgaactgactgcggccgccgcttccccgtcgactccaggcctcacctcctcctccttacgccgacgacgcgacggccgagcgcacgtcgaccgaccgcgtcaagctcgtcgccgtgacgacgccgctcctgcttctctcgtccttctttgcctactactcgacgctcggctcgcttgcgacgctgatggcggttggcatgggcggcctcggcctcttcggtgcctgggtcgtacgttcccttccacgtccgcttacctccagcgaggcctctcttgcaccctaactgatacgcctgggcccccttcgcagtgcatgttttacgacgagaagccctccctctccaagacaacgcatgccgataagcggacgtcgtccttcccgttcgccaataaagcctcggcccggtccatcaaggaccgtttccgctggcagccgacgcggcctgccgaccagcagccatcgggcgtccgtcagcggcctgctgcctcgggcactcggacaggcgacccgctcggcgctgccggggaggatatcgagctcaaggaccgtcgctgaagggcggtctgccatggcatgcccatcatccttgtagctcctgccggtcgatatctcatgcgtccctttttccctctgattcattgcacaggagggtagcgctctacaagtgcttgcgtcgtgtaaagggaggttcggcgcctgctgccaaaggacggactcagagtgtcacctgcgtcatcgttcggggccggaaaggggcaagtgagcgcgtcctcgtcagctgccgctccgactgccagcagctccttcagccccaacgcccatcaaagctttgataaacgtcctctctagacgtccagtcggaagccatgtcagccttcgtcgcgaagcaggtcaagaagcaagccaacgtcggtcgccccgtccagcggtcggcgctcgagctcgctcggctgaggctgacctcgtgcacctcgcttgcctctcccagaaacacctcaaggagaacgtctcacaatttgagccggtcgatgcattgtacgaggaggggacggatgccgagtacgtcgatatccttgaccagggcgatcgtcgttcgtggctgattgccaccactcttcactcgcagcggcaagaagatccgccatagggtacatcatcgcctgtgctacactgaagtcgtgcgacaggagctgacgcatctgtatttccccacagcgcgacctccctccagggctctcgagacaggaggagaaggttctgatgaaggtcatgaagcgcgctgtacgtttcgagccgctacctcggagccgagctactgcgccgtgggctaacgccggcgctcaccctcatttcagcacaggctcgacaagggcctctttagcatttgcggcttccgaatcggtcccctgttcttcttgtcgctcattccggtcgtcggcgacattgcgtgcgcgctcttcaaccagttcatggtcgtccgggtcgccaagcgggcagacattcctcccgcgctcgagcaccagatgctcgtcaacaatgccgtctcggccggcttgtcgtggatcccgctcgccggcgacgtctttctccagatctggaaggccaactcgcgcaacagtgcgctcctccgagcccacctcgaggagcgcggtcgagagcgtctcgccggcggcggcagcggcatgcagaccgcctcgaccagcacacctgctaccacggctgctggtcgctcggccccgggcgctcccagagttcctcctgcgacagctggtgcaggtcgggtgctacgcgactcggccgtctgagcgccttctgcaacctcgatgccatctctactgtacaactttcgttgatccaccgtaatccagccccctcacctttagttaccgcttcactaccctacatcagtcggctgaagggtctgaccgacttcgaaaaaagttgagtgtcgatgacttctccgttccttttccaaaaggattgctctcgatccgggaatcgaacccgggtctcccgcgtgacaagcgaacatcttaaccattggaccaaccaagacttgttgggagaagttggttgtactaatatataaatcaaaagccaagaggaagagcgatggcactgcgcagagtcctcgagcggcgcgcgcgcgcccaagatgtctgcccgcctggctgctcgaccagagacctttgaccaccccaacctgctcgtcctcttctcggccagcgtgtacgttgtgcggcattctgcccactagcttgctgcggcgactgacatgcttcttgctccgatactgtcgctcgaacgactgcccttttcgttcatccgcccatccggcctggcctctctccttcaccccctcctcgcccaacgctcggccgctcgttgggtcacaatctcgcatcctctctctcgctacccgtcgcttgctgtcgccgtcggaccgacattcgctaccggcctgctcgtgcttgcgccttgcttgtgccatctcgttcaatttcgcaccgatcacagccagagtgcctcctcgctctccagcttcctctgccgaccgagctcgctagatgaaccgccaaggtgcgtgccagctctcttcacgcctcggcctggagctccggcttttgcgttcggacaagcttgcgagcggcagacgagctccagcttcatggctaacctctcaacgacacctctcgtgccaacctttcaccgtgctcgacctcgctcctcgtgcctccctctcacctcgcacaaccgggaaaaaacgtctcgcctgctcttctcaccatcgtccttcattgcttgttctcaggcgcacctccaacccggcttccagcactaggcgcgatgccctcatcctcgctcaactccttcccgcggccgtcgggctatccgtcagctcaggcaccttcgccgagcggcgcctaccctcccaacggcccgccaccgccaccgccgccacccggctctcaacagcagcagcgcgggcagcagtcgccctatccgtcatcgcagcacccgcggacacccggcggcggacaggccggctcgtcgcaaggctttccgctcagcggcggcggcctcgcaggcgcccagcagcagcagcagcagggccgctcgaccgggaacggcagcttccccttcagcggaggcatccagcagggctcaaatcagtcgtcctcaggaggcggccagaacgcgagccaacaccagcagaatctgctgagcatgatggccggcggcaatggcacccctcagctcggcaactcgcagccgcagcaggcgccgacgcaccagcagggcccgccgtctgcgacaccgtcgcatcagtcaatcttctcgggcggtagccatggtttgccaccgcacctcgcaggcggctcggaccaggcatcggatgccgacttcccggcgctcggcaacacgcccggcggcaacgcctcgctggcggcgctcaacgcccagtcttatgcggctcaggcatccgcccttcaggccgctcagcagcaggctggcggccacccgcaagctgtcggcaacggcgccttcagcgccgacgacttccctgcgctcggcggcgacggtagcatgctcaacggcgccgtcggtggcggggccatgatgggcggcctcgcagggcaggtccaccagcatcaacagcagcagcagatgcagcaacagatgcagcagctccagcagcagcagatgcagcagcagcagcagcagcagcaacagcagcagcagactggtcagggcggcaagacatcaagaggcctgcaagaggacatccgcgttcgtctctcgtctgctagggcttccagtccggctcccaactggacattgtgctaacgtgtgctctctctcgacagatgtccaactctgcccagtcagcatggccgacacagacgcagacgagcggctcggccaacgccctcgcccctccgccaggccagcagtcgcgaccgccgccgaacggcacgccgtcgcagtcgcatccgtcgccgcagtccccgttggacatggcgcctccaccgcaacagcagcagcagcagggccagcaggccgagggcccgttcccaacgcagacggtccccgcagagcaggtgctcgccagcccggccgacaagtggggactcgccgccttcctgcacgcgatccgcaacgccgacgaggaccggggcatgcttgcctttggcacggacctgatgagccttggcatcaacatgggcggtgccgagtgagtcgtccggattcgcaggccttcagcggcggtagatgactgacgccttaccctccggcagccctttgtcaacgtcactagtcgcaccctgggcagacccagcactgacgcgtggcgtccatctcgaagaggagtatcacacgccgtcgtgctacaacgtccggcctgcggcagcccaaaccaagatgaatctctttgccgaggagacgctcttcttcatcttctacgcctgcccgcgggacgccctgcaggagtttgccgcacaggagctgtccgtaccgagttctcctctcgcagttgcgccgatcaagacactgaccctctggccctttacctgcccgcacaggtacgcccggcactggcgctggcacaaggaaatcggctactggctcaccaaggacccgcgggccgaggcgaccgagaagacggcgacgtacgagcgcgggacctacatctttttcgacccggcaacgtggtcgcgagtcgagcaaaaggactttacgctggcgtacgagttcctcgaggaccgcagtcagcagcagcagcaggcccagcaggctgccgccgccgccgcacaggcccaggcccaggttcagcagcagcagcagcagcagcaacaacagcaggcgcccggcaacccggcaggcggcaatacggctcgcgcgttcaaccagcaggccgtgatgtgaagagacctcctgccgtctctttgctctagccatctcctgttgcctagtgtcgccgccgccctccgaacacccgtgtcccggcctcaatgcgtctccttgtaccctcacccatcgacccgaccgacctattcgattgtgccgttttctgtctccttgcgtgaacctggtaggaggatagggctcgttcgcagttcttcgcctgagaccgcccggcgccagcgaggccggccactctacgttaacgggtcgaacagtgcgactcggaggggatcaagatcacgcttggcatcccggccgtcgctgagggcatcaaaaaggagacgacggtcagcgtctcgatgcagcgcgtcgcctgctcgccccccggcaacaagctgtcgatctggtttgacgccaaggtcgacgcaaacatcaaggttgacttcccgtctggcgccagcggcgaggcgcgcgtgacggtgtcgaccgccgaccgcaccccgcccgccgtattctctgtccggtccgacgacgagcaggcgccggcgacgagctctgtcactaagcaggggtgggagattgtgcgggcactagcggtccgctgccgtgacgagcgccgccagctcggagctgacggtgcgtgagattggcggcgcgctcactatgcaccgtcgtttgttccctgcctactgcgctctttctgggcgacggcaacgttgcgagcacggaggtcgctgcagaagggccgaccacagcagcgcagcctgaccccctcttcttttctgcccgccacctgaaacgaccgtttgccccagccctgacacgtcctcgtcacctgcttgtccacaattaccgtattaagtcgaagcctgaagctagcgccccagagtttcgactgccgcgagccagagccaaccggggcttcaaacctgggcgcgcgcgcgcgcaggtcgccaacttcttgaacaacgactcatggcacatggtgcacttggctcgagctgagacgagagcatgaggtcgggtggcgctgtcagacccttcctcgcaggtctatggcatcccccccgaccggctctacgtcacctacttcgagggcgacgccgcccagggcctcgaagtcgacgccgaggcgcgcgagctctggcttgccgtcggcgtgccggaggaccacatcttgacggggaatgcgaaggtgagtttggttaggcttggggcgctgttagtttggtcgctcgcggagggggttgaagagttgagaaggagggagggcggaagtggtagtggcagagggctcttgcggctctgcagctccggatgttgctggccggcgcgcgacgcttctcaccctagctctctgcgttgctatggccgagcggcaggcctgccgtcgaacgaagggacgggctggtgaggagaggcaagcgggcgttggccggcgcttgacttaaacgggtcgaaacgagaggctaaccttcctacaccttgcaacccttaggacaacttctgggagatgggcgcgaccggcccgtgcggcccttgctccgagatccactacgaccgcatcggcgggcgcaacgcctcgcacctcgtcaacatggacgacccggacgtgctcgagatctggaacaacgtctttatgcagttcaaccgcgaggcggacggctcgctccggccgctgccgaacaagcacatcgacaccggcatgggcttcgagcggctcgtctcggtcctccaagacaagcggtcaaactacgacacggacgtctttgccgggctcttcaacaagattcaggagctgacgggcgcgaggccttatgcgggcaagctcggcaaggacgacacggacgggatcgacacggcctaccgcgtcgtcgccgaccatgtccgaacgctgacgtttgccatcgtcgacggcggcacgcccgatgccgtcggccgcggctacgtccttcgccggatcctccggcgcggagcccgctttgtgcgcaagtactttgaggttgaaattgggagctttttctcgcgccttgcgccggtcgtcattgctgagatggtgcgcgccatcgtctcctttccgtgttgtggccgccggcgtcggacggctgacacccgcgctcgtctcgctcgcgccccctagggcgactttttccccgagctcaagggcgacacctctgcgctctttgcgatcctcgacgaggaggaggcctcgttcgcccggacgctcgaccggggcgagaagctctttggccagtacgcggccaaggcgcaggcctcgggttcggccgtcctggccgggaaagacgtttggcggctgtacgacacgtatggtttcccggtcgacctgacgacgcttatggcggaagagcttgggctcgcgatcgacgaggcgggcctcgcgcaggcggagaaggacgcgaaggaggcgagcaaggggctcggcaagaagggcggggcagagacggtcaagctcgacgtccatgacctcggcaagcttgaggccgaggggacgatcccgaagacggacgactctgccaagtttggtgcgtcccacgtgttgcgggcggtttgagacgagcgcgaggtagctgactttccttcgcgcttctggcagcctcgtcgtcgatcactgcgaccgtcaagggcgtcttccaggcgtcagcctttgtcgactcgaccgcgtcggtcgccgacggcagcaagccggtcggcatcctcctcgaccaaacgtgcttctatgccgagtcgggcggccaggagaacgacacgggctcgctcgtcattgacggcgcggccgagttcctcgtcaccgacgtccaggtctttggcggctacgtgctccacattggcacgctgaccgagggtcacctcgcggtaggcgacgaggtcgtcgctgcgtacgatgagctccggcgggcgcccctcaggcggaaccacacggcgacgcacgtcctcaactatgcgcttcgcgaggtcctcggtgaccacatcgaccagaagggctcgctggtcgcgccgaccaagcttcgcttcgacttctcgcacaagcagccgatcacaccggacgagatggcttcgatcgagcagattgcacgcgactggatcgcgcgcgacgtcggcgtctactcggccgagctcccgctcgagacgggcttcaaaattccgggcctccgtgccgtctttggcgaggcgtacccggacccggtccgcgttgtcacgctcgagcatgacgtcagcgagatggcggccgacccggagaaccccaagtggcggcagacgagcgtcgagttctgcggcggaacgtgcgcccccccgctctcttgaccccccttcctgttcccgttcccgaggctgaccttctcttgcctcgatcctgttctcgcgcagccacgtcaacaagacgtccgagatccggtcgttcgccgttctcgagtcggacggcatcgcaaagggcgtccggcggctgattgccgtcaccggcctcgaggccgacgagtctgcccggctcggcgccgagtggacggcccggacggacgcgctcgagcggctgaccggcaaggaggccgacgtcgcgctcaaggcgtttgcaaaggaccttgcggcctcgaccgtttcgtaccacaagaaggccgtcctcaccgagcggttcgtaaaggcccagaaggcgtttgccgacgcaacaaaggcaaagggcgcgcaggaggtcaaggacgcgctcggccgggtcgccggcttctttgccgagcagcccaacgcggcctgctttgtcgggtcgtttgcgatctcggccgggtcgatgaagacgcttgtccagaaggcaaacaaggagagcggcaaccggcccgtctttgtgctcaacgtcgacccggatgcgccagccaaggtcgcatacgccaacgtcctgcccaaggagctcattgcaaaggtcgacggaaagacttgggcggcgcccgtcggcgcgctcctcaacggaaagggcggcggcaagccagacagctttgccggcgtcggaaccgaggtgaccaaggtcgatgaggcggtcaagcttgccgaggagacgttccgcaagctcgtcctcaacgagtaggcgcgtcgtttcgcaagggagaaacacagactagaaggagatagcgcatgggattcatggcttcgccgactcaagcggaggggctagcctcctgacgagaaagagctatggagagcatgcgatcgaggggcaccttctgagccgtctgagggcacgaaagagagagatgaagtccggaggaaggagggtcgagcgcacccgggcttgtttcgtgcccgatgggcacgccgcggggcgcttgttgcccagccagggcgccagggcgcgaagcgtgcccgaatgagccgagatcattaccccgtgtttcgacctgccggcctagttcgtgctccttcgacgacatcgacccttctcctcgctgcaccaccggctgctatagaccgcaagtgatctgcttcacgttctcctccagtgaccccagtcgccacctcgccccgccccttctctcctgacaggcagacgagcgatccgcctgctgctgccgcgtcggcggagcagccggctgctgggccgtccaagccccggtggagacggcgggggacgaggggcaaggggcgctccgaagagttgggatggaaggcgaagaagtagaagcggtgggtcgagattgtccgcctggaagtgcgtaagaagcgctggcagatgaagcaccagaacggagaaggggagccgatctgcgaggacgagtacgtgacggagggagtcccttgaccctcgacccgctcctcattctcatcgcacgaccgtcccctccagcccagtcatgcgcaccggcgacgaccggacgatgggcgagaaagtgaaggatgctctccccggcaccaacttctcgacgacgcacaacacgcactcctcgactggcgctggcctcggccacggcacgcactcgacgacgactggcgccggcgctaccggactcggtcacggcacgcacgacgaccggacgctgaccgagaaggcccaggacgccatgtcaggcaacaacactcacagcacgcacttgatgaccggtgctggcgcctgtctcggccacggcaacacctaccagtcagtctgccttccttccttcttcgtgtcttggctctatcagctgacgacctgtcgctctttctccccctctcgctgcagcacgaccggcgccggcctcaccggcgactcgcaccagtgcgctctcttttctccctcccaattatccttctcttgaacctgaagactgactctcgactccccctctctgctcgcagcacggccggctcgggcctcggtcacgacaacacgcactcgcatggctcgggtctgacgagcgactcgcaccagtgcgtgctctcccttgcctctctctttctcgcttcccgccttccctctcttctccctttctccttttcttctcttccctttttcgccctcccttcttctccccttctcgaactcgcagctaaccctctccttccttgcagcaccggctcgcactctgctgccgtccgccacaagccgacgatcggcgagaagattggcggcaggtcgagaagcttgtagcaaggcgacctcaaaccctgccaaggaggccgagagtgaggtcaaggcgaccggtcagcccttcgctggcgccgctgccggcgcgcacgagaccgtccgccgctagaccccctcgctctttcttgatcgcttctactcggaaccgatcttcctgctccccagacacacgacgaccgaagcccaatgtagcctttcgcatttcatgacgcctttgcccttgtcttcttttcggctgccctcgctcgaccatcgcagtcatgacgtgctcacccagctcgactactgggacctgctcgccgtcggccaggttgaccgtcagctgggcgcgctcgtccggcacccaaccctcgacgttgtcgctcgccggcggcacccaaaggaaagcggaccgaagccagcatatggagggccggccggcatctgttcctctcgcacatcacttggatcgggatatcgacgttcatgtcaagagcccgtcgagggggggggcggatttcgcctgctgctgcgcctttgccttcgcctttgccctttaaagcggcaatcgaacctcgttactcgccgtggcagcggacgaggacagggacgcgtaaagagagactcgcaatgaccagcatcgtgatcggcagtctgggtcccttcttttaagggcccgccaggcgacggctccgcagagcaacgcgcgcgcgcatacaacaagaggagaacaggagagagagaggaagagacgagggagggagcctcagcgggcgtcacctgtcaaggcttcgcggagaagaccgttgagcgtcgcgctctcgttgcgctgtcggccgtagcggagcgtcttgctcgcctcgcgcgggaagacgcgcggccccatctgccgaagttgggccgccgtcggtttccgcacgcccgcaccaggcggtacgaggagagctggcggaatggccgacgacgttggggcagcgaccgagctcccaccgcttttggcgagcgcggtcgtgagccggcgtgagggcgcggccgcgagcctcgcccttgaggcctgggctgccgaaatgagccaggcgagctccgaccccggcgtcgtgctgccgttggcgtcggatgccgcgctggccgggttcgcactggtcgacgccgacgacgacgacttgcccttctttcccgacccggcagcgccgccgcccgccttcctcttcttgccggtcgagggctccccgccgccgccgctggcttttggcgtgccggtcgcctcgctcggcgacttttcgacctcgcgccggagcttcgactccttctgcttggctgcaaggtgcggcttgtggacggcgttccattcggcaaagaggacgtcgtacggctttgaccggccggggacgtcgcgcttcgctccgaccgagtgcgacttgcacgtcagcgcgcgcgagcaaggaacgcccttggcattgatgacgccgcagtgccggttcagatccagcggggcgtctgccgaaacaatggaagaaagcaggcgtcagggcgagtgatcggatgaagagagctggccggctgcgccagacgcacggcgctctcccttcttctctgcccgctgcgcctccttcagcagccgcttctcgtactcgcgccgctgagcccaagcctcctttgaaaggccctcaagggcagacgtgctgccgccatagtccgactcagccgcgaccgagcgcgaggccgtcgacggcgccggcgagggcgggtcgtacttgctgcgcttggccgtcggcgggctcgacgttgacgagagcgaggctgcatcagggacggcaggcgggtcggagcggtcaggaagggtcagccgagggtcgagatagtctgccgagatgcgacacagcaagccactgaccgtttgagagccgtcgcttgctgggtttcaggctgaccgagagcgaccggccgtcgtcgtcctcgccctgcgcgccagcctgttcgagctgccggaccttgaggcacttggctgcgacccggagagaaagagcaggcttcagcttaatcgtctccttctcgcaaaatctggatgagagtagagccagaggtgaggacgaaccggcgtgattgaggatggccgactggagtactggccgctcgcagtcctggcagcggacgaccggcatcgggtactcgagcgggctaaagccgtggagctacacgccaagcagagcagcagtccggattagcacgcgatcttacacaggctagctcgcggaaggaggaggaaccgacgctgaagtcgccgacgtcgagctgagccgcgtccgggctgaaggcggccgacggcccgccgccggaggcgtccggcgacgacgtcgtctgaaacgcaaacggctcgggctcgggcgaggctgcggccgagtcggcggccatgactgctatgagattctgctcgcgacgagctgccttgctgtttgtcgagttgagggacgatggagaacggcagccgaggagacgatgacggtcgggcggccgggcgcaggcggccccgggcaaaggcgaagagagagatgggcctcacgtccctcccaacgacctgcctctccctttgcagcctctcactctagcacagtcctacggctagcgctcagcagccatgcccgacacgtcgtccgacaagctcgtcaaggtgcatgctcgaagcggccgagcttgcgtcgccttcgcctgctcggctcttcccgccgcctgttcgctgatctctccctccccttcgctcgctctcgcatgtgcagaaagtctgtacggccaagaagggcggcccaaagcccaaggtgagctcttcgtctgatcagcgactgctgtacagcatgagctgattcaattgcaccttggatttgcagtacctcgagtgcgtcccccttccgcctgcgcctctcgcccgcgaggctgactggaccccctccgtctgcccttcagcccgatcattgccctcacccagaccaataatgcggccatcccagacctctgcgcgagcctcgctcgtcagctccgcgagcccaacgtgacgattgtcttcaaggcgctcctcgtcgtccacaacatgatgcggtgcgcgcgacctctccctccctcgtcatcgaccagtcagcctccgcccggctggtgttcgaactcattggactgacctcgctttcggttcgtactggcagctccggcgggaccgatgccgtgctcgagcacctcgccaagatggacgtcctccggctcaagtcggtcggccagggcagcgtctgggaaggtccgtccctgcagaggccgtcgaccctctcccctggccagcagaagctgatccgttcgccactctcgcaggctaccagcactcgtcgacgctcacgcactacgcgcactacctgcacgcccggatcacggctttccgcacgctcaagcacgacatggtccgcgtccaggccgagagcaatcgggcgagcgcctaccggacccagaccgagggcgcgagcggtacgtcttttctcgtgcacgaggtccaacctaggaggtcgtcctgctgatcctctcctcgtcgacttagaacgcgcccgcaagctgcgctcgctgacggtcgagaggggcctgctgcgcgagacgcgcgaagtgcagcgcatcatcgacacgctcgtcaagtgcacagtcagtcatccgacgctctcaggtcttgccgcccatcaatgctaacgacgaatccgcacctcagttctaccgcgacgacctacacgacgagtgcacggtgctcgccttccggatgctcaccaaggatctgctagtcctgttccaggccggcaacgagggcatcatcaacctgctcggtgcgtccctggcgcaacaacaaacgcacgagaagactgcctgctgaccgctcgtctcgctaaccgccttccccctcagagcactacttcgagatgtcacacgccgatgcatccgacgcgctcgcactctacaaggccttctgcgcgcagaccaagaaggtcgtcgaatacctgcgctttgccaaggatctcaacaacatcatcgacgtcccgatcccaaacctcaagcacgcgcccgtcagcctcgtcgccgcgctcgaagagtacattgaggaccctaattttgagcagaaccgcgaagagtacaagaacaacgtgagcagacctcggcggcccttcaccaggcccggagcgctgactagtgcctgccctctccttcaattagaaggacatcgcggacggcaaggtcaaggctccagcagcagcgcagtcctctgctgcagtggccaagggtttgtctgttgcgcgctgccgtgactcgtgggcgtctccgcgctgaccttcgtcgtctccagctccctcgcccgtggctccgtcaaagccatccgcagctccgaccgccgccgcctcctcgtccgctgtcggtccctcgaccaacggcggcgcccctcagcagcagtcggtcgtcgacttcttctcgtcgatcgaggacaaccagaactcgatgttcaacccgcagccgaacagcccgacctcggccttcctccagcagcaggcggccgtcaacccgtttgcagcccggatgatgctccagcagcagcagacgatgtttgcccagccagccggctttggtcagatgcagccgcagatgcagcctcaaatgaccggctacaaccccttcggagcaatgcagcatccgcagcagcagccccaagcccagttcctccagccgcaggcgactggctacaacccgttccgccagagcgtcatgcctcagatgacgggcttccaggggatgcagcagcagcagcagcagccaattcagcagcagcagccgatgcaggctccgcagcagcagcagcagcagcagcaggcagcctctggctttgatcagcagttcgcgtccatctttgacccgtcctctgcacctcaaccgccgtcgcagcagcagcgacagccgcaggcctcggccttcaacttcgacgaccagttcgcctccatcttcaacgcgccggcgcaggcccagcagccgcaacagcagcagcagcaagcgtccgccttcgggggaggcttctctggggccaacggcttctcctcccaggcgccgccggcccagctgcagcctcagccgacgggaacgaatccctttacgcgatcgcagagcgtgcccctcgtcgcccagccgaccggcagcaaaaacccgttcggtgccgcgccggcgccggcgcagccgaagacgaccgacgccgtcggcaagggcccgtcgctcatggacctagcttttggcaatgctcagcagcagcagcagcagcagcagcaacaacagcagtcgcagcagcccggcgccatgtcgtcgctcgcctccgactttgcctttggtcgggccagctcaaccggcgacgcatcatcctcctcggctgccggtcagggcctgtcgtcgtttcagcctgacgccggccgtgcggccatgtcggcctcgccgcagccgctccagccgcagcggacgggctttgccggatcctcggttcagccgtttaagccgtcgtcgtcgtttggcgcttcgcttctgtcttccctgcccgagacgtcggcctcgccgtccggccttcaacctcaaacgaccggcctccagcctcaactgactggcctgccgaatcctttccgatcgtccacgcttccgacgagctttcgctcctcgccgggcctgccgtcgcagtcaacaggccagagctctgggctcggcgcccagtcgacaggggcgagctcgttcggcgcctcgctctttgggacgacgaccggggcgacatctccctcgctcccgacgccgacctcgcagttcggcgcgatccagccgcaagcgaccggcatgcgggcacccttccagccgagctcaaactttggccaggagctccaggcaaccaagacggtcggcgccgacggcggcgggttcaacccgttccagcgctgggcgtagtgctgggggcgtttcgatctgatactggagtcatgcttatcctgcaagtgcggcgtggtcgggccatgagaaggggcctacaagaagggtgaatcggagatgtgagcagatggggtcgtgaacgaggtcgtgaagggaatcgaaatgcagtgcaaagggggagagtgcgaagaaataacagatgggatcacggcagcagcgcttgaagggcgccgtaagcctcggccatccgagcgaccgcggcgaggtgcaagggcaggcggccagtcgggtcgttgatgcccgtctgccagcgatggtgcgtaaggaaggcgagggcatggaagccctcggcgagctcccggctcaaggcgccaaagccgctcgttgggagcgcagctgccgatggcgttgccttggcgaggaggagatggacggcgagcgaggccggccggctgccggagggcaaggcgttgcccgggctcgaaacgagcgtgaaggtagcgaggggcaggaaggacgtcggggccggcgcagactgcttgaggctcatccgcgaggccagccgtctgccaggcggccgactgtccagcgcgagcggaagcctgtacgtcgggaggaggatgctcgccgttcgggtcgagtcggcgaggaacggagtcaatccgcggtcgagatgtgcctgtcctctggcagagggcggcgccgtcgtcggtggcgacctcgtcgagggctctgcagagcgcacgacaaacggattgcctgcatgcggctcggaaaagacgacaaacagctggaaggcttgggcttcggaggcgagctcggccgttaagacttggtcccaggctggacaatgacaagcaaaagggcagcagttgtcagccgcgccgtcgaactcgatagcaagcacgcgagcgagacgtacccttgacctcgtcagcactcggagcacccgagcgcgtgatgaccatgcgccattcggcggcgccatgcttggcgaaggcggtcgcttgagcaaggacctccttgacgacggcatctacccaagggccaaggcagccctcgagccggcgcgcaaacggctgctgggcctgaccgcgctcgtcaatcgcgcagccaaagagccagtcgccatcgtccgacgtagcgtaggcgacgtggagaaaggcgtggtggtcgagcaggttgagcggaggcggcggccactttagctggaactgtagcgccggcggctcagcccgggcgaggtggaaggccgggaactggatgagggcggccggagtctcgttgctgaagatctgccgcgggaccagccgctcgaccttgcgcatcagacggtcatagacggcgagcgccagtcgcttgccggccgttgacggcacggccggatcgagcacgtcggcgtacgggacgagctgtgccaggacctgccctgagcgcgagctcaggagctcggtcagctgctgccaaacctcgcgcaggtcaaaggccgagctcaagacgtttggtggcgtgaggacgtaaaggactgagtgcgggatgccgccgagctgcgcgagaagcggccgcagcgattcgacgagctgatgtgggtcgaccgcaaccagaccgttgtgaacgcccgtcatagttccggcgatatgccggccgagaccttgcgcctgtcaaggggaagatggtcgcagtcgtcagcgccgatcgcctcggggagcctccgcagcggccctcctcacctcgtacgtttggccgatggctgcgagccagcgactggcgctcgcgttcatgcccgcgccagatgactcgtagacgacgaacgccgcgacgtccttccgcccgccgaccggttcgagcctgatcttgctccaaaacggaaggacttcgggcgccaccttgaggatcttaccttggaagccgaccgcaagcttgacctttcgaggtgcgcggatgacctctacggagccttgctcggcgacggaagggcctgagtggcggggcagggtctcgacgggtcagattccggacctgcacagacgggatcaagatcgaggggcttacgaaggagagccgatagggcacctgactcgagcttgaaggcactcgcagcggtggctggatccgagagaaagcctgccgcacagagaagtgaataagcaggtcgtcggccagctcgccggtcgcgtgggatacgaagcggacgtacggtgctcgagctcgagctcgacgattgtggcctgcaagacgtcggccgacagattggggctctcgacggcttcgtcaagcagccatgcggtgaaggccgtggttgcgtctcgactgaagtccttcagactcgagccgagataaagcggcgacgtcggcgtcggcgcccaggccggtgttgccgcggccattggcccgggagtaagtgccgagagaggcattggggtcgagatgctcggcggcgcgtacgaaggtcgagagaaggtcgacggaagcggcacagaatctgcaggaaagacgcccgtcccgaggtgggcgagcaatagccggccgacgggtggatcgatctcgtccttgcggccttgagagtgagcgtcgagctcgagcccaccagcggtcgactgaggcccggcaggccggatgacggacccctcgtcgtcgtcgtcattgtccgacagatcggccccttctgcgggcggcgacttgtgaaagacggcgttgcgagtgcgtggcagagtgcgcttggtctcgggcgcctggcgcctcaggtgctgcttgacgcgcccgacgacgctgatccgtggatccgatgcgagatcgtagagctgacggaagtcgcactggctggcctcggacagcagcagcgggctctcggacacgtcgtcctctggcaagctggcgcgcgcccagagcgccttgaacgacacttggccgccagactcgggctccggtcggggcagcttcatccggccataaggctggatcgcccgaaaggatctggcctgactggtcaaagactcctttgccgagcggcggatcgggaagctgaacttgccagcgacgtacttctcgtcggcctcgacatgcgacggcccaaagacgaccgactgaaacggccgagggatgtagagcgctagcggtccgatgggtgcgagaagctccggcccctcctctgatttggcggtgagcaggatgggtccggggtcgccgaccggcgcagaccgctcgtcatccgacccttcctcctcgacgacgtcgacaaacggcgaaaagggtgtctttggcgtctttggcgtccgattgacgagccacgaggcaggcgagggcgccgtcgcggggttgggcgaggctcccgtcaggcctgcgccgggtgcttctgtgttgaaggtcgcgaaatcgagcggcgacggcgccgtcaagtcggtctccatcagctgcgagagcgtaaattctgcgctctcgccgccgtcctgcgcgacgaacgtcggcatcggcgagagcgagaacgacgggtcgacaaacgagctggtcgtggcggcagcgacgtcgtgagccgccagcgggatctcatcggctggggcgtgaattaccggtggaagctcggcgaacgcgtcgtgcgacatctcgctgccaatcggggctgagtcgaagaagtcgaagtcgtcctcggtgacctgctccggcccgccccaactcggctcgtccggaaggccactcaaaggattgacgccaaaggctcggaggccgccgttcgaaacgccgccggctggcgcgtcccacgaccaatccattgcgtcgccgccggcgtcaaagacgggcgcctgcggtggagggggcggcggcgcaatggattggtccaggccgaccagattcggaggagctcaaagcctggattgctcgtcagtctgtccccgtcgctcactcgctctgggtctgatacgtgatcgaaagaggctgacctcccgttcttgttggaccgctcagaacgcctccggtcgagagacgcctcgatcgcagacggaagcgacagcgcaatgccggggctttccagcgggaagcgcaaggcctggctagagaatgaaactggtgcgtctttggccctcctcgcagaaggtcctcttacatgcgtttacgccagacgtgctgagcgaccggtctttgacgcgctatccatctctgcctcgctaagcctttcttagcgaagctttcgcacccgagcgccggccgaaagtcttgggcggcttcgctgtcttccgaagacaggtcggcttcaagcgcgatccaagcctgcccgcttcccgtcgaatcgccgatctgaatcagcgcctcgcggccgcctggcggacgctctcggacgaagagagaaaggtaaagctgccttcctggccctgccactgcgccacactgactcgattgcctcgccgaccttgcagacctacgacgagctcggaaagaagtcggccgatgaccacgataatcaactgcgcgacatcaaggccacctgcacctacttcgaatggcggcagcttaaaaccttccagtccttgaaagatttggggctcaccgaggatccgcttccttcgcttcagctgcttccgcgtggctttcgccgccccttccgcattaaaaccaatgactggcgcaacattgacccacagctcctcaagatacaggccaataacgtccgaccctggatcgcgttccgcgcagaatggcgggcgagccatccaccggccaatctcggcagaaaggacgccgcgtggcgtgacgcaacgcaaaaggaggccggtgccgcctggcaggtgaagttggccgcagagaaggcggtcaagaccgaggtcgaccctgccgaagtcgcggaggccaaagccgggaccgcgaccatttctgcagctaactatcgttcactgtggaagccctcgccgaggcagcgacggcccgccgcccgcaacgatgcatcggcctcgacgtcatccgaccggccgaaatgagcgtctacatgcatctcgtctttgcttgcaccagcgagcgatcttctgcctgagagcctcaagcgaagcgagtacgcacggagcctggcgagagataacgcccgagcctggcgcgacgatttgatcgcgcggtggctgctgcgcccgccgcgcttgcccagctgccgtccactccttcctcgctcgccctcctggcagcgaccctcttgagacgacgcgagcaaacctaaaggccctctcgcccctcttcttccccgcgcatctgcccgcgatgaagctcctcccgcgcgagcaagacaagctcgtcctccaccaggtgagctcgtcgttctcggctgggcccagccccttatcgccgcgcgccctgacctgaccctgctcctcgtctcgcccacccttcccaggtcggctcgctcgcccagaagcggctcgcccgcggcctcaagctcaaccagaccgaggcgacgggtctgattgcatcgcagctccaagagttcatccgcgacggccagcactcggtcgccgagctcatgcagctcggcaaggacatgctcggccggcggcactgcatgcccggcgtcgtgacggccctgcacgaggtcatggtcgagggcacctttccggacggtgcgttccctgctcgaccagtggtctcccgttctggctaggaggctgaccaacccttttgcgcctcggcagggtgagtcctttggtcttccgcgccagctgggccccgccgactcgactgctgactgcgcccctcggcccgctgtcctttggtcgttggcgcggccgccagcacctttctcgtcacggtccacgagccaatctgcaccgactcgggcaacctcgccaacgcgctctatggctcgttcctgccggcgccggccgacgaccgcttcccgcttgacccagaggaggcctacctgcccgccaaccaggccggcgctgtcgtctgccggcctgagggcatcgtcatcaacaaaggccgccaccgcatcaagatcaaggtcaccaatactggcgaccggccgatccaggtcggctcccgtgcgtctggcttgagccctgttctgcccgaccacagagcgcgcctcttttgctgacgcgcgactgccgcctcccgtcttcagactacccgttcctcgagaccaattcgatgctgtcgtttgatcggaagcatgcctacggcaagcacctcgacatccctgcgtgagtgcgctcggctcggtggatctcgctgacgctgacgccctgacctcaacagcggaacggccgtccgcttcgagcccggagagaccaagtcagtcacgctcgtcgccatcggcggccggaacatcgtctatggcggctcaagcctgagcacgggcccgctcgacttgtcaaagtgggacgagatccttcaccggatcaatacccagggctttgcgcatgtcgaggagccgacggcaaaggtcatcaccgaggacaaggtcgtcccgcgcgagacctgtcagtaactcttttcccagaggcccgcggcaacagatgctgactacgagcctcacagacgcgagcatgtacggcccgacgaccggagatcgcgtaaggtgcgccaagcctccccgacgtcgcctgcctcgtcatccgtagagtcgctcacccctctcctctcttgctcgcagacttggtgacactggcctctggatcgaggtcgaggacgacaagacggtctacggcgacgagtgcaagtttggcggcggcaagtcgctccgcgacggccagggccaggcgaccaacaagcccgatgccgagacgctcgatctcatcatcacaaacgccctcattgtcgactggagcggaatctacaaggtcagcacccgagtctcgctgatcgtgtcaggacctcgctgacatcggtttctgcgagcgcaggcggacatcggcgtcaagaacggcctgatcaaggcgatcggcaagggcggcaacccggacgtcatggacggcgtcaacccggccatgattgtcggctccaacaccgaggtcggtcgtctctccgctcagccggctgaggacgcttcaactgacagacctgcgatccttgctttgcctgctcaaaggtcatcgccggcgagaagctcattgtcaccgctggcgccatcgatgcccacgtgcactacatctgcccgcagacgtcgaccgaggtgcgcccgtcctgcctacctactgctattggctcgctcggggagactaacgctcgagctaggcgctcgcttctggcatcacaacactcatcggcggagggactggccctgccgccggctcaaacgcgacaacttgcacgcctgggcagaactacatgcaggccatgatgtacgtcgttcgatcgaaggcaacgacgagcaccggctgacaaccggtctctctttctggcagggcctcgactgatggcttcccgctcaactatggctttaccggcaagggcaacgactctggccctcgcggcctcgtcgacagcgtccgctcgggcgcatgcggcctcaagctgcacgaagactgggggacgacgccgaccaacattgacgtctgcctcgccgtcgccgatgagcacgacgtccaggtcaatatccataccgacacgctcaacgagtctggtgagcggtgctgatttttggctgctggcgattcgtctgcgctgaccgcaaagtctcgcgcgcccacaggcttcgtcgaaagtacgattgctgccttcaagggccggacgatccacacgtcggtctcaccagtagacgctcgctctcgccgggcaaagctgattctcgacgactcctcactgtctgccgaaaacaggtaccacactgagggcgccggcggcggtcacgcacccgacatcgtcgttgtctgcggccagagcaacgtcctgccgtcttcgacaaacccaacgcggcccttcacgaataacacgctcgacgagcacctcgacgtccgtcgcgcagcctgtacctcatcatttggcttgccggagactgactcgcgtcggcccctctcgcagatgctcatggtctgccaccacctcgacaagtcgattcctgaagacattgcctttgccgacagtcggatccgggccgagaccgtcgcagccgaggatctgcttctggacattggtgccatctgtgagtcggccaggcttgccctggctgttgatcaagagcagtcagctgacgacggcctccttgacgcgctcccttcagcgatgatcaggtacgccctgccgctccaccttcctcgactcctgcctgctgacctctgttcgtgacacggcagctctgacgctcaggcgatgggccggatcggcgaggtcatctctcggacgtggcgaacggcggccaagatgcgcgagctccggggtccgctcgagggcgactgcgagggcaacgacaacatccgcgtcaagcgctacattgccaagtacacggtcaacccgtgcgtctgtctcgcgttgcgctggtcgccgctgctcgcgctgacaactgtcttgctctgccttcagggctatcactcgtacgcgcctcatggcctggctctgtcgctcgctcccactgacgaccacttgcctcccttcttccgatcagacggcatgtcacacctgatcggccagatcgtccccggccgcctggccgacctcgtcctgtggaagccagagcagtttgggcagaagcccgagatggtcgtcaagggcggtctcatcgcctgggctcaggtgcgccctcatttcaaagacacttccgctcggtgccggccggctgacgctgcagttctgcccgtacgctcagatgggcgatgccaatgcggccatcccaaccgtccagccgatctacggccggccgatgtgggcgttcacgcccggcggcgccgcgctgagctccatcacctgggcgtcgcagctgtcgatcgactctggtgcgtgtcgacgtgcgcgcttcccctcatctgcggctgaccgaaagcgcgctgcgggctcatcagggacgatcgcgtcgtacggcctcaagaagcgggtcgaagccgtcaaaaactgccgcaagatcagcaagaaagacctcaagtggaacgacctgacaccggtgatgaagggtccgcagcggctgagcaaggcgacagcgctggctcgctcgagactgacctccctgtctcttcctcgcagtcgatgccgagacgttcgaggtcgttgcggacggcgtcctgtgcgacgtcccaccggccatcacgctgcccttgaccaaggcttacgctctcgtacatcacaccagcttgcccgcccactccccgagtgtcaatctcgaactgacgatcacgcccgctcgccaacagttctaggccggtctttggcctgcgcctttcatctttcagccgtcactttcacgatcctcccggtgtgttgtcttatgtccttcgaccgtcagcgaaagcagaggccgccagcagatctcgtaaatggggggcatcaaatgggaggcggggactcagcaggcctacttgaccttgggcttcttcttcttcttctccttgacctcgccctcgccggcctcgccgacttccttgcgcttcttcgacgccttcttctcggtcttggcgtccttgccaccgtcctgcgtggcggtcaccagtgccggcgccgccggcgcctcctcgtccgaagcggccggcacaggcagctcggccccgccgccgaacgcggcgttgcggaacttcatcttctcgagcggctggagccggaccggctttggcggcggaacgtacatgcgcgacttgggcgccgacgccgacgacggcggtaggttcgaagacgaggcgatggggatgatgggcgcgagcgagagggcgccggtgaggagccgaggggctggtgaaggcaaagggggtagacggtcgtcagcctgcagcgcgcatccctaagccagcatgaggacgcaccagagacataagctgccgacttagcattcggcaccagaacgcgcaggttcttgagctcctcggccgccccctgcgggtctgccgccttgacaatgtactcgccggccttggtgctgagcgagccggtgaggccggcgccagattcgttgaccgacaggctaagcctctcgaggctctttgttttgacctgaaggcggggatgtgacagtggtagtgtcagctcccagtagcacggagcgtagacgtcgtcgaaaggagcgccttacgttgtcaggcaggcgaacggtgtacagctgcagcttggggttcgccagcagcttcgcgtagtcgaagtcggagccggacgcgagcacgactttctgcatattgcgcggcggcacgtagttcctgtaggtgggcgtcgcggcatcagtccagagctagacgaaggacgtcgacgagcagagcgggacgtacagggtctgcgaggtgccggcttgaccctgctcctcctcctcctcggagctcgactcgctcccgctttcgctctcactctcgctgtcctcagccactagccgcggcttaggcttgaccttcgacgacgacatcgctggcaccgcacgctcagcctcggaagacgacgatgccatgtcggcgtcgctgtcgtcaatcgtctcgcgcgagagcatgcgggaggcagccggcggcgagccggcggcggcggcgagggccgacttgctcgactttgccggcttcgaagacgacgacgacgccttggcggcagacttggatcccatcgtgtagcggacttgagggctaagggaagaacgagaggtggttgagtcgagctctctacttgagcagcagcagccccttcgcgtcgtcgccctcggatttcgcccgagctctcgtgatgtcaggctcagccgagcgagcctggcacgctgcagtcagcatcgtgctagcggccgcttctccgtcccttcacctcttcctctcttgtcaagagcgcctgagatgtcgactccgactccgaccaccgtcttcgtcctcggcccgctctgttgaccggccgtcgttcggcagctctgtcatgattcggctcggcctcgagcgggcgctcagtaacgtggtcctccgggagaataagtgtgctagcaacactcactcaactcgtgcctggcgcccactggcaggccaaaggcggaggccagccgtcaaagcaggatggccgagtgctacaatccgaaagcaaatcagaggatgaatggaagcttgcgcgaggagcagtcccgggcgagcgagcgagccgcaagaggggctggatgggagcgagttggccggtctcccgacccctcatctcaaccgcttccggcaggggcgtcggagacatagcgaagaagaggcacatgaatcgagcgaggtgctgagaagagaggagtacagggaggccgcccgtgggcggcgaaggagagctacaaagggcttcggccgagggcaagaagcgatcagggaggggcaggcggtcgtaagtaggggaggagagcaaagaggatggcctgcagcagacgggcggcgggcctctagtggccggcgcccttctcaaactttgtgatcgacttgatgttgtcaaagttgtagagcggccggagcgtcgccgacttgtcgcgcttgacccagcgcttgatgaagtagggcagcgactccttgagctggtagcgggcgtgtgtcatggtcgagacggcgaagactgcatcgagctcctcgagcgtgcggccggcagtttcggggacgaagaagaagatgaggacaaaggcgatgacgttgaggccggcgtagaagcagaaggcaccgagcgtgctcatggcgacgaccatcgcagggaaggtctgtcagaaggagagggatggaggggtcagcgacggttaccggcagtctcagattgcgcgaaggattgacgtacgattgagaggagggccgcaaagccgaggcaaacggcgacggcaaagcccatgccaatctcgcggtgcgtgagcgggaagacctcggccgagtaggtgaacgggaccggtccctctccaggcgaatagaagcaggcgaagagatagatgaagaatgctgcacgagatggacgcaaggggaggtcagcaagtgagggtcgaaggggagaaagggcgggctgctgcgcaccgataaggccgagatgggccgggctcgaactggggatcaggaagcacagtccggccgcaagcagcgtccaggccatgttggggactgcgagaaggcggagagagggtggtcaattggctgtcgaggtcggaggacgttcgagggggcgaaaaagggccaggagacgccgcgagcgaaggcggacgcacaggtgagaagcagcaggttccgccggccgaacgtatcaatcgtgaagacggccgggaacgcgaacaggaagttgatagcgccgaatccaagagatgccttgagggcgttgcgaggggtgtagcccgcctgaacgaagatggtggacgagtagaacgcgatgatgttgataccgcctggaaaaggggcagacgcgtcagctcctggcctctcagcacgagcgcgagtcgctcgcaggacgtacacatctgctggccgagcatgacgataaaggcgccgagggttgcgcggcggatccgagggacgacaaagaggtcgcggacgcggccaaagtaggtggtgccgcccatgatggcgcgctcctcctcgagggcagcccagcaggagaacatgtctgtcggcagtcgagaggcgagagcgtcagtgtcgggtagggcggatcaggcgagccaaggcgagacgtaccgcgcgcggcctgaagcttcgagttgcggagccggcagaaggagcggaaggccttcgggaaccggcccttcttcatcagccagcggggactctcggggcagaagtagatagctgcgagacggtaaaatatcgcagtcagaagcttgcagaagaaggtatacatggctgggtaggccggtaacgcaccgatagtcatcgggacagcaggaaggaaggcagatccgagctggtagcgccaagcgtacttgccgacgtcggccatcgccatgttggcgcagaagccgaggaagatgccgaacgccgtccagagctgccacctgtgacaacgagtgaagatgatatcgagtcaaaaagggtcggatcgcactgacagagttacagagggcggcgcagacgtacgacatgacgagtccaccgcggatgttctggagcagacgacagtagaatggacgaggtcagccagggttctgagttgaaagacaagagggcagacgagagacgcacggcagggacattctcggcggcgtagatcggagtcgtcgaggccttggggcccatgccgatgccgagtagcaggcgagtgatgaagagctgctgccacgtctgggagaaggcgctgccgatgaccgagagggtgcagaagatgccgcagaagaagatgacgccgcgccggccgaggaggttgttgagggggtccgaaatccagcacgaaaggccgacgcaagcgagatacggaccagcgttgatcacgccgacgagccactcatggtagacgtgattagggtcacttggcgagttgcttagggcaagaagcaggcaagggttagttggcagaaaacgagggtcaaagaagggagaagattcgtaaagggactcactcaatgccgagcgcctgcgggaagccgaggttggcgccgttcgagccggtctggtcccagccctggacggcggccgagagcgagcaaacggcgacggtgaagtctgcggaggaggcaggaaagtcagcgagcgctctgtctctccgcagctcgaccgcacaagacaaactcacagagggcaaacggctgcttccacttgtgcgtcgtctcgcgccggaggtggtacttgtcgtcctcggttaggctctcgtgctcctcgaacgactcggggtgctgggcgaggatcgcggccttctcaaagagctcgcgctcctcctcgagcccgctctgggcggtgaagagggcgaccttcttgctcaggccctcgcgcgagaggccgtagagcgggttctgaagccgggcgttgacattgttctggtagtcctcctgcaggtggagaggattaggctcggtcagccggaggcgaaagatgtggaggctcggagggggagaaacgcacgccgcgctcgtcaatctcgaggtgctcgtcgctgtcggtgtcggcaaactcgcgccgcttctcgtcgggcttctgggaagccatcgcggtggacatcggaggtgcagataggggctgatctgctaggtgtgggaggttgcggagggaggcaagggaagggatgaggggcaagacaggagaagacttggagcacccgggcatccttcttaagggaaggtggcgaccccggagggttcggcgtgagctgggagccgtatgtgccgtcatttcggagggacgggttcaacccacaaaagccaggtcggtagtccggaaggggcgacgaggcggccagcgccgagcttggcccgatcgctttgcggggccgggcgagccgacgcatgtgccgatgacgggaccgacctcctggaggatgctcgacctatagggggacgccagcaggtgggctcgaagcacgagtggcgctgctcgacctccttgcctctaccagtcctgccgacctctggatgatgtctggcgaggcgcagaggtgggccaacagagagggctgccgggccgaattgttcaaaggtcagctgcgccggtgaatcaggtcgaccagcaataccgccgggatgaccgccttcagcccaagctctttcctccaccacctcgtcgtccttgctcgcgacggatgagcctgccgagacgcacacgaccacggtcgcacgacgaggtacggaggcgcggcgctctgcagcctactttgacgacctcagcttgccctcctcactcggtcgtcgcacctccctcgccagacgcgcttgaaccgtcacgacgccgagcccgcccgcgaccggaggcgcagtacccactctccaggcataaacagtccgcgacaaaggcccgaacggagcctgctgctgcttgcagccaccgatgggccaagcccagtcgcgacttcctccgcgccgctgcccgcgccacgcgagaagcaggccgctcgctcgacgtcgaggacgccggtctgcgagtgccggctgaccgacaactgccttgacttggtcgacaacccgacttccttcagattgtcttggctacactcgctgcacgctgacttgtgcagagctgacgcgctggcgaggacgagctgttggcggcccggtagcgactgaaatcgccagcgtcgagacggcatggccgacggcctctccgcctcttcgcttctgtaccggtcagcgtcgagaactttccgcgtgcggtcaacttcgtcttcgccttccgtctgccttcctccctcccgcttctcgcctccttccgagcttcgcaggccggctcttcctcttctccagccgcattcgctcaatgcctcaggcgagatgcctgcccgtcgctcagactcgtccgagtcggccatcactgcttcagaatgagttgggcgaaaggccgtcgacaagcggcgtcggtcgatcaggggctgtatgtcgggcctggccaactgccgtccctctcgatggacgaccgcgtgcgcgtgctcctcggcctttacatgtgcttctctggtcagacagaagcctcgacgtccgcccggggccggggcagagagcgtcgtcttcctctcgccggccgtcgtctgccgggcggtctgtcgaaaccctctggcgggtattcctctgtcgcctgtcctgcccgcccctccgggcgacgacttggttcaagaggcagcagacaatgctatcacgcggcgtacaaaagatccggggtttcgggaaaaagggaagaggaagagaagagaggggaagagagaaagagggcggaggcaagagtagcggagggaggaagaaggcaaaggtcggaagaaggcacgccgaagccgctgaatgcggtctttaatggaaggcgcggccatagtcgacgccggcgcggacggccgacttgagcgcgccaagctgctgctgctgctgctggtgctgctgctgctggccaaacgccgggccaaaggcaaacgcctgccagtcgagcgtcgacgggccggcagggacactgtagccgccgccaccgccgttgccgacgtccgagccattgtggctgccgtcaaagaggccaaaggcgccgacgcgctggctgctggcggcaatgttggcgagaagggtcgccgtaaacgggttctgggcgtggtggtgctggccggcgagcgtcggctgctgctgctggggctgctggtgcaggccgtggaggaaggacatcggctgctgcatctgctgctgagcctgctgctgctgctgctgagcctggatgtgggcaaagagctgctcggcagcccacgacgaaactttgtcggacgcgtcgtcgtcggcggcgtcgccaggcgagctgccaccgccgccgacgctcccaaacatgcgggccgaggacgagaggggcgactgggttgagtctgacgaagggggcgtcatagcctcgagctttgggaaaaagttggccgccgacgggtgctgctggtggtggccgaagaagtcggcggcgccggcggcggcgtggtaggcgacggcgtcggtcccgaagaaggacgagccgtcggacgagaatgactgcgaggcaaagtcggggtggaaggccggcatgcacgaagccaggctgtcgttgtcagagagggcgaccgagccggccttcttgttggcggcagcagcggcggcggcggtcttagtcggcttgacaacgtccgagtcgagcagcaggaggtcgtcgtcgtcgccgtgatcgccccccatggcgccgtcggcaaacgtcccgaagacctcgtcctcgaccgcaaacagctcgtcgagcgtctcgcctcccccgacgacgccgaccgcaagctcacggccgtcgaccgcccggtgctcgttgacttcggcgaggaggccatcgcgctcggccaggagcgcccggagctcgcgtgcggcgagcaggcgctgagcgcgctggagcgtcacgtaggcgatcgagccgttgacgatggccgacttggacggccggcgggcggtcgcgagcgagggcaggagccgggcgaggtcctgcacgcacgcgagcacgagtcagctgacgtgctgcgcgctcgacgaagggtgggggagggggacgcacgaggaagcggccgttgagggcctcgcgccgctggcgctcgaccgcattgtggctcgcgcgcttctcggccgtgttgacgcgcttgcggctctttgcagtcttgatcttgccggtcgtgctctccgacgaaggcacgcggatcgggcccgcgggcttaccgttgacggcggccgggagggcctggaggaggttggaggggtgcgtgaaggacgacatgaggcgcggggggagctaagggagattaggccgggcaacaacggggcggtcgcgccgagggctagagggatcgggcaggtgagtgcggttggccggatcagagggtgagataggttggccggagggttggaaaggccacgataaggaacgacggaggagggcgagaggttggtggaggagggatttgcggggtcgagattggtggcttgacgaacgagggcgagcgttgggcttgagagagtgtgaaccgtctgtagcgagaggactctcagcttgcacttgggacgttgagggggcgaggggggggggcggaggtaggtcgggtcgagggaaataaggttggtctggtgaggcggagggaggaaggagagaggggaggaggagggggagaaaggccagggtcgcgagcgactggttggcgggatcccgagcccgagggacagagagagaacgagcaagacgggcgcatgcgaggaagagaagggcagcgtatgtcagtcaacgtgttgcccaattagatggatgggccagacgagggaagccagcagcaagaggcgagccgggccggggctgtgaagggcggcgcccggcgcggccgagctcggaagggggaggggagtcagggcggccaaaggcggaggcaacgccctttgcccctccatctcccatccctcgtcgctggcttcccgtctgcggcgagttgtgtggtcgtacacaagcggtatcctgatggctctcccccccgctcacaaacggccgcaagcgctcagcagcgctcgacggcgagacactgccgctcaagaagctcagatcgacactcccgccgccgccgggggcgtcgccccgccctgctcgaacggcgttggtcgcgcctgatgctgctgctgcgggtgagggcacgccggcggtcgacgtcgaggaggacgaagaggaggacgttgccgacttgtcgttctacccgcaaatacaggtcgactttgattttgacgcggagcccgccaccacctccgcctttgccggcgcatccgccgtcgacgccgacgcgcccccctcatcacaccacctcccgctcgtcgactccgacctcgcatacctcgccgaaacgaaatcgctcgtcctctcgcacctggtcggccacgcgccgcccctcccgcctgcaaagggtgcggtcgacgagcatgccgaaagcgtccagacgctgagcgagctcctgaggggcacggccgagaagggtgaggggaacagctgtctgatccaaggcgttcgagggtcgggcaagtcgaccgtctgtccttcccttctttccctccgccgcaacctccagctttcgttagacttatgttcgccccctgccctctctgtcatcgtcgcaggtcctcaaccgcgcgctcgcaaacgtcgagtcgtcgacgacggccgaaggctacgagccgccgcatatcatccgactctctgcgctcgtccagaaggacgacaaagctgcgatccgcgagattggcaggcagtttggcatccaggatcaggaggagccagcggcggcggcggagggcgagggcggcgaggtgcgtcctttttttttcggccattttaactctttgcctaccgcgcgcgctgacacgcgtttgttttgctccaggccgcagccctcgcaccgacgacgcttcccgcccacctgctcgcgatcctcaccgcgccgagcaaaaaagcgatcgtcatcgtcctcgaagagtttgacgtctttgcgagctttggccggggcggtcgccagatgctcctatactgcttgcgtgcgttgctgggcgcgagcgtgcttccgggctgcttggccgtcgctgatgctgctgctgtgcttttgcgatccgacacgcagtggacgtcgtccagtcgatcagaccgagtctcgagggcgcgtcgggccgaggtgtcgctgtcgttggagtcgcttcccgattggtgcgttgcagctctttcgcttcgtgtcgcctactgccgcgtctgaccgaccccgcttctgcccgcacaggatacgctccacctgctagagaagcgcgtcaagtcgcgcttttcgcaccggatcatccgcgtctcgtcgcccttccacggcgaccgttcgcacctcgccgtcccagccgccgctcgcgatggaccccgccgcgcaacaccggcagcctgcaacacgaccgacggcgctttggagggtgcgcaggagaatgggcacgacgagccgccgcgctggctctcgttcgtcagccaggcgctcgtaccctggcagccctggcaggaggccgggccgaacggcgagggcgactggcggggcgcatggcgcgagagcgtcgaggttggtccctcttcctgctcgcccgcgtcttggcgctcattcgggctgacgaacgaccgtgtcgcccttgcagcacctgctcgcaagcccgacaattcagaccggccttgagcgcctgacctggctgacgacggacgtccgcgcgcttctcaaggtcttcgtgagttggccctggcgaactatgcgacgtcttgcgccgccccgtcgctgacctcgccttgcgcccccaggtcctgcccgcaatccggctcacgcccgagcggccgttcctgacggtggccgccatccagcggtctttgagcgagcaagcccagggcgcaggctggggaaaggacatgcggaagttcaagagtgcgtcccccggtgggtgaccccagcgtcgctcgtccgctgacgtacctcttttcacgttacagccttgagccttccttgcctgtcggtcctcgctgccgtcaaggaccttggcgagcgtggcatcctcgagttcaacttcgagcacgtctttttcacgtacggcgagtttgcaaaggcccggcttgtcgggaccggcaaagctcgcttcagccggctcgtcatgaaggacgtcggtcccgtcccttgtccggctcagccgatcacctcggcagcaggctgacctcgctctgcgctctacctctgccaggccttcaaccagctcgtccagacggccgtcctcttcccctgccagtcggcgacctcggcctccgcccagtccttctcgacttcggccgccgactttgcaaagcaccgctgtgccgtctcgccctacgacattgtcgagctcttccgcgggccggcaggcaagggcattctctcgcagctctcagcgtggggccgcaagtatgacgtgcgtctcgtacttgcgcttctgctctcgtccgccgcctgctaacttccctcacctactcagatttgacgccccttctaccaccttcctttccgctctcgcgtacacgccatccgcgcctcctgcatgctgttgctctgccgaaccggcgcccggaatggggcagcatgatacaagggttcaacgagtggggccatagcggctctagagctggagaagagcagattcgtacaatgaatgaaaggcgggtcggtttactcggtcggcacctcctcgcgccagcgcgcaatcttctcgtccttgggcgcgtgcggcgagggctgcatcggcccgccgtagccgcccatgccgccgtacgccgcggccatcatcatccgctgctggtgcatcgcttgctgctgcgcctgctgctgctgtagcaagaacatctgcgcctgctgggccgccgcagcttgctgctggtagtactgctgctggaggtgctgtgcctgagagagaccgagcgggacatcgtcctcgtccggccgctgctggaaggtcgagtgccggacgccgagagggacatcatcgtcgtcgtcgtcattgtcggctcccgggttcgcgccgacaggcgggcgacttgatgcagcctgctggagcgagctgccgccgtcatttgtccgcccgcggacgagctgcgagagcggcacctcctcgtccgacgactcggcggctgccggtcctgatggctggtaaaaaaagctcgagggtcgggcgttggtccggagcgagggtaggttgtattgggccgccagcgggatgtcttcctcggacgaggtgtcgtcgtgcgtcgccattatcttgggcagcggccgagccgacttgactgaggccggtagcttcttcttcttgggctggccgttctcatccgtgtcgctcgattcccagcccgcacggctgagaatgcggctcgagcgctgctcggcacgtgcttcggcttgccgctcgggctcgcgatcgtcgtccgagaacatgtcctgaatggcgtcttcggcttgaaagttgccaagcgacagcgaaggtgcgagggccgcggtccgagcttgggccggcgactcgaggccggctccagagccgttgtcatcagcaaggtgggcatcgcgcccaggcggcgaccgctcggctgcttgagcgaggcctgattgcatcgacagcatgcccgacatgcgcctcttgcctttgagcttgctcgcccgcttggcctcggccgccgcccgggccgacttttcggcctcctcgcggcgctgctcaacctcggcgagctcccggtcctcctcctcacgttcggccatggcgtcttgccagtgtttgtcgagtccaaagacggacgcgcgctgactcatcccaagcgcacggacagaggcggcgtcgccgtcggcggggaaggtcgagttcagatggaccgactggggccggccacggatcgacggcgccgactgaaaggttgcctcggtcgccgaacgagtgaacatcgccggtcgagagtctccgcggaaggtcctgggagcaagcgtgacaggatcagtttgaagccagctgcttctcctctcgtcacctggacgtacctcttcttattggcgagctcctgcttgcgcagctcgagtgtatccatcagactgcggccgtacagggtgcctggcccgcggtactcgtcgtcgggccgaatcatccagtggtcgctggcgtcatcctcgtcgttctcgtcaaaggccttgtcgccctcctcgagcgcgctgccgaggaagtcgccgccgcgcttgccgtcgacgacgagcgacgcccggaacgtcttctgggcgagcgtcagcgaccgtagcgggatcgccagcgcggaagccgatgcgatgaaggatgacgaggagcgcgagtgatgcagtgggggccgcgacttgaagtcgatcggtagaggcttcgccgccgtctggaagaagcctcgcgagttgatcgactggccctcttcgtgcgcggacggatcgagcagagccggcatgacaagaaccggagggaggtagatcgacgaggtcgcagaggtcgccagtcggccggtctgcttgaagtgcgcgagcgaggtcgatcgagggacacccttcggcttccctggttttcgccgagcgtcgtcttcgtcgtccgcctcctcttcgccctcttcgtagtggacgccgttctgcgatgtcttgcgagaccgagcgttggccgggtcaaagcgagacgagcggcccttcgaaggaggcggcagccaccgctcgcgctcacgctcgacgtcgttctctgcgagatattcaacctcggctccgtctcggttcgacagtcgcgactgctggagggaccgacgagtctcttcgaccgcatcccgcccggcggctgggtcggcgagcagcccaggcgtcatccggccgatctcgtcgagaaggctcagcgacgattcaggccggccgaccgcctgaccctctgctgtcgcctttgcctcggcggctgcaaggtccgatgatgagggtccgtgaccgccaaagaggctgcttggccttgcatcgaccgagcgccgagtgtcgacactggagcccttaacaggaccgctgcctgctgcgggcgcaagatcttggtccctcggcggcggcgtctgaccatgtcgcgaagtagacgagatgatgtcgaacgacgaggtgacggacgggcggcggtccgtctcgttcggctggggcgaagcgagcctacccattggctcgcacagcggccgcgctaccatgactggcgactctgccgcgagggaggcttcgagggccgatgaaggagccgcggctgcgctcgggctcgcagccgccgcttcagccgacgttggcttgtcgaagtctgggacctcaaatgccggctttgctaacgctggagcctcgttgcgcgtgaaacgccggacgatgccgttgacgccgcctgctgacagagcatcgacgctctgcgagcgcgacttcttggcgatcgtcccgtctgggccatgaacggcgccgcttgccgcgccgacgagcgcgccgtcctcggcgacatcgtcttcgaggaagacctgactagcagccgcgctccgcgaaccaaaggagcgcaagttggagagagacgagtcggactggaagccatcttgctgctggaagacgaggtcctcccagtcgcccatgctgccggtccgcgctcgtgggcccatgccccgtcggtggtcgccactcggcggatcgcctccgagcgaccgaggcagggccgagatagcatcgcggagcgcgagctcgtccggcaggagggcgagcgaggcagagggcgacgccttgggcgacaggaagcggaagggcgacttggaccgccggcgggccttcttggtctcgggcggggaggccggcgtctcgaagaaggggacggcaaagagcgacatcgactgatcgatgagctgcatctcgagcggcacggagctcgagcgagatggcggctggagtggaatcgaggcaaaggatggcgagcgcgcagaggctcccggcagcggttgcggacccaggggcgagggcgaggccggagcgaaggtcttgaaggccgaggctgaaggaggacggtcgagtaacggctgagtcgatccttgcacttggtgcgaagtgattggaaaaccgctagcgtcgttcgacatgaactgcgccgctggggtccgagtcggaacgggagcagcgagtggcgggcggtcgctagtccgaggcatgctcggcacctggaaactgcgtggctcgccggcttgaggtgcaggatggtgtagagggatcgaagacgacgtctcctctgaggcgaacgtccgagcgctcggtggcgggtcatcggtatgggactgctgcggcgcgggagccgaggggtctgcggccgcgatctccttcatgaaaggcgaggccgatcggcggaagtctggcggtgagactggccgctgggctgcaggatgaggctgttggagagaaaagaaggagacatagtcagacgagtgacagcaaagggcggccgtgcgggaggagtgctgcgcgggccggctccgtcaaggggcgagcacggctggggctggtgggccctttcgaagatcgcttcgacggctgctgcacacgaaggagagcaaatgaaggctaaggcagagaggacgtacctctaggacggtgatccagctccggcgatcgccttgcttgccgacggttgaaggaggtggcgagctgcccggccgccgagcaggagcatcgacctcctcatcctcccggtaggcctccgacggcggcctcgtcctctctggtcgagaacgtcgtcctcgaggaggagcagacggcttgacattggcgagaatggccgactctcgggcaaagcgcggctcggcgacatacgggtcgtcgttgtcatactctggggtcaagagcgaaggtgggtcaagggagggagccgtcaggagacgaccctctggccgggaggcggcagcgagcgaggcgtcgctatcgactgaccgatcagagctgctgcaagctggacacgcgagaggggagccatgccgagaagctactgtgctgcttgttcagggcgagaggaggagggtgggctagaaggaagatggcgttgggtgacaggaagaagcccgcccggctggccagcctcgtcgtcggaggcgcgaaccaggcccgcgcagtcgactgttgctctctgccgccaagaccggtaggcagtccatctcctttgagcagagcaagtaaaaaaagggacctctctgatacagtgttgatcgtggtcttcgcccgacaggggacgtctgcctgcgctaaaggaccaagagaggatgaacagaccgcacgcgcaaagagctctcatgcgatcgacccggcgctggacagcgctgtgcagccctgcacggacaacgacgacggagagcgtccgccttctacgaccctcgctggagactgagcccgcggacagccctggcggtcggggcggagcgggttgatgttggcatcgcgaggccttgccggccttgcgagccggtcgaccagtgccgggttcagcccgagcagaacgaagtcctctgaacttgatttcctccgaaagtgatttgtgctgagcccggcgtgcgtcgtgcgcgtcctggtgttttgtgtacggcctcgagttgggccggctcggacggtgcctcaggctctgaggcctgcccgctcgaggagcgactcgagcgtctcctcgagctggtcgagcacgatcttgtcctcctgccccttgcggtccttgccgacgttctcgagcgcccgctcaagctcgtccatctccttgctttcgggctcctcccagtcaatgccgtcgtgctcgcgggcatgcgtctcggcctccttgtcggccgggatgatgtcggccgctcggacgcgagaaagccgggcgatcagcgcgcgtgtgtcggcaatgaccttgtcaaggtcgcgaggtggcggcgagctcgggcccgggtggcgcgaggccggcgtcgcgaggaggcacgcgagcagggaggacgacgagccgcggaggaagccaagctggcgcgaggccgacgacgagaggatgtagccgtcgtcaaagccggcctgcaggttggcgagcttgccggcggtgataccctcgcggtagccctcctgcagaagacggggcgacaagagtcctaggtcagcgacgagagtcaggccagatcactcgagccaagagattgacgacggacattcgaaaacttctcctcgagctgcccccactccttgtcggcagtggtgccctcctttattggcgccgactcgagccagtcatcgtccgagtgatcgacgtccatcgttgctggcgttggggtctgtagagtgactgcttcttgggtcgaagtcggagggcttcggaccggctcgccgtcgtcatctttgatctccttctcgccgccgagggacggctccggcttctccctccgaaccacgaccagcccgaaacccccaacacaggcttgcttacaaaagatggacagcatcatgctcgagcaggccggcaacggtctcccgcgcgacgacgagagcaaccttgtcgtccaggtcgtcagcgacattctctcatccgtctttgacggcggcgtcaatcggttcgtcccgccgtcgtgccggcatgatgaggacgaggccggccgactctctttgctctctggctgaccggacactttcgttgttctcatgccctgcaggggccttatcattggcatgcatgcctcctttgcagggctgtttctgacgctgctcggcctctgggttctgaccgacttcaatggccacgtcctcgccctgactgccatctcactctgcctatgggcaacgaccggctggtacgtccttcaagactggcgctggcttctctcttctcttcatgcgactgcttgggctgaccgattcggctgtcctttatgtccgcgggcaggttcgtcacggagctgctcgccgcgcagcgcctcaaggcggccgagcagaccaagaagggtgcagcggctgctggagcagaaggcgacgacgccgccgacgcctccacagcccagacgacggcgacagacgtctctgacccccttggcaagccggttagcaaggaggcggccatcgctcagttccagaaggccgtcagcgacgcccaggccgagaccaagaaggcacgctgagcttggaccggggcgatgagattggaagatgcgaggtgccatctaataggtgtacaacagcggccgagggtgcgtggcaaaatgcgaggtgtatggcgggtatgcgagctcgagaacagaggcggtgaagtgagatgaaggacgaggtctggtcggtggcgcaggccgtgctaccgatgcgactcgcctggtatgccgccgtctccccagacgcgcatctgctttgcgctctccatcgcgatggcaaagactggtagagtcgggtcagcaattgaaggtgtcgaacgtcctggcgcagcggctgcactcacgttcgcgctcctcgccctccatgccctcccggaactcgcccatcgcctcgcgtccggccatgctaccaccgcttccgcccgagctgaggaaggcagcgtgctgtgcccggtcctggatttcgggcagccggaacttgaacgtcgtcgtcaacagtgctgagagcgagttggcctgcgggtcatcgagcctgtgcggcgcggtcgtccgagccggtggtgatatcagcctgcgtgcagatccctcgacagcagcgtgaccagtcaaagacgtacactccaatcaacctccggccaaagccgtaccacatgccgaggccgccgacgaggttggcgagcttgaccgagtggggcgaggcgttgagcgcgttccggacgcgcggcgagaacggcggcgggatcgtgaagctgacgaactcgctgctcggcccgagacagctatcagccggggtgggtgaaatagagtggggacagtacgcacttgagagcgagcgtctgagcgagccagaagggaatctcgaccttggcgagctctttgagctgagaggggcgagggtcgagctgggcatcagctcgctgtgctcgaacgtcagacgaaaacgagactgacatcgttgcctgagccgccgtccagatatccaagaccctcaacgtcgagcaggaaggtacatggcagcttctgtagggccgggcagcaccagaggcagcagtcgtcgaggtcagcagcggccgagagctcgagcggcgcgggcggcgagcgagctgcctgggtcctcagacggacctggttgtcggccaaaatggcgtctatcgagtagtagtcctgattgtccatctatcaggtaagacagtagaggagagcgtgctgctgtgtcggaggggtgagcgtctgggctgaactgacgaggtcgattcgggcggacgcgacgcgtcgttgcgaggcgatcgacgcgactgagtgcatactgcccggcccgcccttcgccacgtacaggacctttcgcagatgagttcagccgggtcgagatgggcatcatacgagatcgttgaccatctcctcctcctccgggccgactgctggctgcgatgccgcccctccctccgcctcgtcctcgtccatggcaccgcccgcacttccttcctcgtcgtcgtcgttatcgccagccgtcgagaccgccgcagacgacatggccgccgaggcgacgccttccgagccctcgccagtcgcagccgcagccttggcgagcttgcgcgccttgcgcgccgttggctcgggtacgacaccgttctgctcgtcctcgcgcttctggcgcttgcgcgcctgcgcccggactcgctcttccgaccggctcgccatgaccgaccgcgtttcctgcgcgacgtgcctatatgagagtaagcaccagggtcagtacaggagctccggtggcaagcaggacggtcgtttgactgacaccttgagcgcgctcagcaggaagccgccggtcccgctcatgcccatgaaaggatgcgatcggccggggaggacctggtagtgccgcagccagctctcagtgacgatcgggttaaggtagccggcttcggctcgaagctttgcctgggcttcggtcaggacctgacacacagcagaaggtggggttgatcagcgcctgcgagaatctcagtcctcgagggcgccacgcaccgagagatacggagagtaggccgagatcgaagccgagccggtgagataagggcagaggaacgagatgatcgagtacggctcgtacgatgtcgcgaggacgaggctgcacgcggggtcgagaatcagggcgtcagacttggcgctctggggcagagcagcagagacgcacccgtcccactcgccgaggaggaactcttcgcggacggcgagcagctcctcgcgcgcgcgcagcttcttgcgtagccggccgagcttgttggtctttacgcggcccttcttgacgccgagcgtctcgtcgacctccttggtcctatcgtccgtcgcggctacctcggcctcggccgcctcgaacgtcggcagcggctcctcctcgacggggacccagttcgggctggcgacgtgccagttgaggctgccgatcatctcgctgacgagctcgggcgggaagttcatctggttctggaggatgtggtacgtcggcggcgagtcgctgtcggtcaacgtcaggatccgaccgcggccgcccatccgctcaatcatgccgccgaggacgaggccgcccgtgtcgtcgacgacgaggtagcgccctccaggccggacgttgccgttctggaggagctgcgagaatgagtcctctcgaagggactgaattgaggtcggcatgcgcgcgaggtggtacttgatcagatttggcggcgtcggtgcaagcggcgtcagtgatcggccgaacctgggaagcaacggcgaggagtggtcagctggcgtgagcacagtctcatgcatgcgacaaatggccgacttctgctccttgcgcttcttgtacttgtcttgcgagtaggcgtttttgaggtggaaggccgtgtgccgctcgatctgcctggcgatgatctcctgcgcgctcgcgccggccgctttcatctcagagatctcgtccatcgtgagcgtctgggcggcaccgttctcgtcgccgatgagttcgttggtcgcatccgtgtcctctgtcgagcgggaggcgagcagacggttagactacgggtcgaccgcgggggggagccgactcgcctgaacgcaccgacctgggcgaggccctcgccgcggagtgggatgagcgtcgtctttgagccggccgactgaggatgctccgacactgcgtcctggatcgtgtaggtgacgccgtaaagctggccttcgagcgccgccggcgggaacgagccatacttgccgagggagacggtcttgctgacgtcgcgacggggcgccggagattgttggaatcagccttgagcggctcaacgacgctacaaggcgctagagcccagcacgcacccgccctgtttgagctcgatcatcttcatcgtcccgttcgggagcgagaggatgaccgagtcgccgtaccgcatccgtcggacgcgggcgtcgaggagcgcgtcgaagtcgggcggcgccggcgagagcgcggccgcctgaggggcagtcaagagcacgtcagctcgcgtcctcatgccaaagtcatcctccggtcggacgcactgccgaggtcgaggcttctggaagggacatggcgaggcaggcgaggacagtgagtgtcggagcgaggcgacctgaatgtcgagcaggtgttgaggttcgagacacaggaaccccaatggcccaaaatgggttcgtgccccggtagagggccgtcgcgcagcagagcagggcgcagggggatcagctgccggccacctcctgaccgcaactctctcactcacccagagcatgtcatccctcaaagcgatcgagaaggagatgaagaaggagcacaaggcgaaggccaaggagcttgaccaggcgcacaagcagctcgaggcggccatcaaggacgagcagcgggcgctcaaggtgcgtcgcgtccgatcgcctgcccgtcggtcaacattgacccgctcgagagaactaccacggcctgtcacttctgctgaatgctcctgtactgacgctgatacacatccactcttctggcgtacagggcgaggagcatgcgcatgccgcgctcgagaaggccatcaagaaggaggccaaggccgagcacaaagtccgtctacgggctgacgggctgctgccagacgccatcgcacgagctacaggttgacctccctcgatcgtccgcaggtgattcacgctcagcacaaggagcagaacgcacagagagaccttgagcgggccgatgccgagattgcacgcgccaagcagcgtacgtcgctccttccgccgttgcttccgttcccgaaccaggcgcacgtctagacgtcactcgtgactgcccagccggctgacgtcttcgcactcttgacttgatgctgcagacgacgccgatctcaccgcagaggtcgagcgcaagaaggccctcgtcgccgacctcggctcgaaccacggcgaccaggctcgccagcgccaggcggccctccagccgctccggacgcccgcaccggcctcgaccggcgctctgtcgcacatctcgccagtccctgctgcaatatcacctatctcagccccggcgacgaccaaccaggacgtcctttcgacgacggcgccttcagctcaggcaccccaggcgcttacgtccgagcagcaagaagccgagcaggcgatggagaacgctcttttggccggcacgacgaccgctcctccgtcaaccgtcgcaccaggtgctccgatctcgcaagcccagtgctgataagtctgtcgcttccggtcgcctgtcgcccgcggctttcattctcggacgaacccgtcccagtttgtggcccctgtctggttgtatgaactgcctgttgacacgagctgagcgtgaacagggcagagcttcaactttcctctgacagcagtgcgtgtcggtaaggagggcgaagatccgtgacttttgccaacgacgacgactggtcgaggtgtcggagttgatacacctcgcggccgcgcagctgccaccctctgcgtcatgccgtcccgccgctgctgctgctgcctcgctggccttcaagaagggcggcggccgttcctcatctcgccttccctcccgaccatcacctgctttcctccacctacccaaacaaagcttgggtcgcggggagcagcgacccaagctggcgggtttcagcgacagcccgtctgccggctcgcaccagcaggcatcttcgccttcggtcgcctccggccgcgtggctttggtccggcgggagcaatcgctcgaggaatccatggcgacccaccgcgaacgacagaaaatgctccgacccgtcgacccctcggatgcatgtcgtccctttcacgggtccggcggccaaccagccagcagaggccttggtcagcaagacggttccaggccgcggcctgcaacagaggcggcagcagccatgggctggctgttcctcctcgaagcgatgtcgcaccagccgggtgcgggcagcatcgccctgtctgctgcgctactcggcgaacacgcccggtcgaccccagacaggggtcggcagaagcgatgccgattgacctgcagcagtccacgctgacgaatctcgctagcccgaccgctcgacagcgggctctgtcgaaacgagcgtgcccctctcttccgtgcgggctccgggccaacgcagactgagcggcgagggggcaggggccgtcgtggaagccttcaagcagagcaccaggtacctgcttcacgtccagccggaccttgtataggccgggtggagccagcctagcacctcccgacctgctcctccgagctccctctgtcggaagcccgaggccgagccggccgccggaagaagctcttggcctcctgcgacctcgctccacgcgagtttcacgccgggcttttttttcctctccttcacgttgcagctcgaaccggaagagcggctctcctgctctcttcgacgctaacccttcaaaggccgggcccactcttgctagctagctcgcaggccgacaggcaagctcttgagagtcagcccgcacgctctagttctcacaccgagcctgtagatcgccgacgacccccgcctggcctcactcctcaccctccgcctcagtctgcgtcgcccggggatggatgtctagtcgtcgtcgagaggagcatgtcatttgccgccctcaatcttgcgcagccgttcgtactctgcaaacgcgacgtcgtcggcctggccgggggccatgaagtcgcggcacatgcgcgtgaacgagctctgggcgagccggaccttggccggcgtcagcgccgtcaggtacggcattgcaagcgactcccacgagtggtaggcaaactggccggttgcaaagaacgagtgctcgagctgctcgtgaacctgcgagtgatcacgcgaaaggtcgccaccggtcagcctcacttgccaaaacgaccgcgaggcgacgggacgcacgtagtagatcctcgactcttcaccggatccctcccaaagcggccagaaaaaggcacgctcgttaagcacggtgatctcgtctggataacttcgtgcaagctcctacgcaagagagcgttccgtcgggacgaatccgttagcgctgccggtttggccgagacgtgagaaggagggaaggccggcgcacccaaggcttgcggacagacatgccggcccagtcctcgccggaaaagtcaacgtaagactccagccagcgctgaacaaacctcgactcttttgacgagatgatgactgcgttacaaaggcctagaaagagagtgtagagtagatgagccatcgttggcttcgggctaagccgcacgccgagtaaaataacgcgcaccctcaggatcaagcggtggccggtcagagttgggcgaggcctccatgcccatgaccgtgccaaagggtagcagcttcttgaagctcctcgtcactgcacgatgcgcaggggtgagcgaggtcagctgccgaggagggatgaggtcgcaaagctgacaaaagacgcaccgtagacgtcgatgtcgaggtagatgccgccagtgagttgcagggcttgtaagcggacaacgtcggccttatgcgcaaagtgttcgagcttgttgttgaagattgagtcgggggcaggtgtgcgcagcagcgtgagctcgggctcgagcagatcccaaaacgggccccgaggcttgaaccaatagtggctgcgagcacaagaaggagagcgtgtagtgcgtcagtcgtcaacttcggccatgcgcagagcgcagaaagcgggcaacgcacaagtagacggcgtcaggcttgagattgacgagcgctgaccggatggcgaggtacgtgtagtacggcagaagctcgccctcgggctcgcccgccttcggcggcttgtagccatatacatagtggacgacattcggcgcctggcctggtgcgggctcgacgggaggcggtgggtggtaggctggtcgtgcgagcgccggcacaggcgggaggaagtcactcgacgggacgtggaacggcggcggtcggcggtaggagaagaggtgacctgcatgagcgacggcagctttagatgtcagcgtccgtctagcgacatacagcctgtagatagagcgacgctcgttggacctgtcaggaagccgacgacggagaggaagggacgaaccgaccgcgggcgagagcaccctcccgagcagagctcccagcaagagcagcagagcaaccgcccgccagttggacctcgggccgccgccgagcgcccctggcagccttcgtgaccagaccgagagcttgaccaggccctgggaagggagggaggccgaggcggccgggcgcccgtgcagcgagcttggtggggtcgccgcgcctgacggcagcatgggcgacgacaggccgccgttgctgccgccgccgtgggtgagcgagcggatcatagggcgggcggacgggcgggcgacggttgctaactctggatgaccagcggcaagggcttgtacggaaaaggcaaggacggacgagatgatggcggtgaggggcagcaggacaagccgactccgggcgcgtcggcggcgtcgcggcgttgcgctatagagccgcagcgtactctcgctcgctgccgacgagggacttgggaccgcatgacaaagtcttgggacgaggaccgccaacgaagtcgagaggctgtctgttcgctcaataatggagtccttagccagcgcaagacgaaagatgtcgtgagaagtcatgtcgattcgtcaaagttttggtaccagccgggcgtttctactctcccttgccatgccaggcattgagagcgcctttgccctcctcgacgacgcgcttgtagttctggctgagcaggtcaaagccgagcttgtggtagatctcggtcatgcccgacatgtgcggcgtcagaatgacattctcgagcgtgtagagcggtgagtcggacggcaggggctcaggcgtcgtcacgtcgagcgaggcggcgccgatctgaaagttgcccgtcgtcgcctcgtcggccggtgccgggcggtagagggccgtcggcgagccggcttggagggccgtgacgagcgcgtcctggtcgaccgtgtcgccccggccaatgttgacaaagacggccgtatccttcatggaccggaaggcagcctcgtcgacaaagccggccgtcgccttgctcgacggcatcgtgttgacgacgacgtcgcaggcagagtagaagccgtgcatcgactccttgctgccggtctcataccaagtggagggaatgtctgcaggtcagaagcgcgaagacgctgatcagcaagcgcggtcttgtagtcgagaacgagtggacggggaacgcaccgccgctgtggtcgcccgtgccctcgatgaggaagccgccgacgctggccttcttgccgctccgggtcgcgacaacgacgtccatgcctagcgccttgaacatccggccaatctcacggccaatgtgaccgtagccgaggacgccgacccgccggcctcgcagctcgcgcgtgcaatacatctcttcatcgaaagtacttttggcaatccacttggagttgttgcgggccgagaggatgaagcgtgggagcgagtggtagagcgagagcgtgaccgcgaccacgtgctcggcgatgacggtctgccgcagcaaagggagcgaagagtcagcacaagtcctaataaaacagggcggcagccgatgaaactacacaccctcctcaaggagggaggcggcaaggatgatggaagggtcaggagtcaggcgtagacgcacgacgtggatgcccgacgcgttggcgaggataagcgagttgctttcgtcgagcgacttgtaaaagtcggtcccctcgtagtgcgtgtagccggcgctaatgagctggacgagcttgaggttgggcgtctgctcgacgctcttcctgtgattcggcgggggacgggaggacgggaggacgggaggacggtaggacgggaggacaggaggacgtgaggacatggtcagtcttgggagagctgcggctggtcgatcggccgccctcgtcacgcacaagttactcggagggaagaggcagtagagaacgacggcgtccttgagctcttcctcggacggcgggctgtctgcatctggccggtagacgaccttggcgtccttgtgctgggcttggaggtcgatcacgagctaggagggaggagaaggtcgaggtcggcggtcagcgatcgctggctggcagggcagcagagtcgcgaagcgcaccttctcagaccggacgttcgtcgcgacgaggatggttccgggcatgctggcagatgcgaggaaatagggagagttgtgtaagaaggtcgaggtcggagggggacagaagggggcgacgttcaaatagcagctgcgggctgagaactgccgccggctccggcccgaaggagcgcggctggtcgggccggatcctctgaggaactctgccaggccagtgaactcgcgccggttttgtcgagcgtcctcttatatgtaagcagagctcaagcccgtgtacatcatcacggatcaaaacgccagcgggccttggcctagaacatggccttccaccgggcctcgccgccaatctcgccctggaggtcgcgcaggacgcggccgacctcgctctcgtccatgccgctgccgaggccgaccttgcgccggtcctcgacgacgttggccgcgccgccgttgcccgagatggagccgaccgagagggcgtaggacgagagaagcgaggcgagtatcatcaagtactcggaggcgagcagccgcgtccggaagggtggaaggctggtgagtgacgagaggatgagtgagtgatcgagcttgacctggaaagggggcaaaaggatgctcatcagaggaggcagcgccagtacatcgacgacaggtgggaaaattacgcacccggccccactcgagctcgccgacgcccgtcttgcgaatgccgcggacgacggccgcgagcatgaccttctcgtagagcgagcagctgcggacaaactgggccgtcggattgcgcgacatctcggcgaggaccgcgctgatctgcttcatcttgaccggctgcggtttggtgcttcgtcgcggcgtgccggtcccgggcgcagtcgccgccgcgtacgaggcgatggcgacttcgactgcccggcggcagacgtcgagcatccgtcgggcgtcgcccgtcacgccggtcgtcttggccgccgcgagcgtcagcgcgtcgcgctcaatcacttggaagtcggcgttgtcgtgacccaggggtggcaacggatgggggatcaaccgcgactgggcgatttcgacgagctggtccttgctgtaaggcgggaaattgatgcgctccatgcctggagaaggtcgacagtgaagggtcagtcgcagtaacggagcttaccgtgcagaatgacttgttcctcctcacccatgcgactcttgacgcggccagcgagcttctcgggcatgtccatcgtgttggcaacggcaatgacaatcagctgtgagttgggcagcgtcggccagttaaagaagttgtacacgacgtcctgcttggccgtgaacagctgatcgagctcgtccatgaggacgacgctgaggatacgaggcagacttgtcagtctcatctcgtagcgctgaagcggatcggcggacacgcactaggtcgtacgtcgcggtccgccaatttgagacgctttccggccctggcctgtgccaaagtgggcctcgaggcccttgagcgccgtttttgcgctcacgctccggcccttgccgccggccccaccggcgccggcctcgtcgtcgctgccgtactcgatgtctgggctcatgccggcgagcgcctcccagagaacgacgtaggcgtgacccggatctggaattttgaggccattgatctcgacatactcgaacggcggtagctcctgcaaaccggagggctctgctgcgtcagcgggcgcgcctttggggttttggattgcgggtcgccgtgtgcgcaccatatcccgcgccttctgcttgagctcgcggacgacggcgtgcaccgttgccgtcttgccggtccctggctggcccgagatgtctgtgaagaaggaatgagggtcagccggcgctctagtcgcccttgacactggtcgcgactgacagatgcaacctccgccgccgccctcgatgacgccttcgatcttgaccaggacgtcagcgtattcctcctcccggcaaggtagcgattctggcgtcgcgccgacgtggagcaggtggagcgcccgttgatacggatcgagcggcagcggctgggcggagggaggccggagccggtaagtgagagattggaagcaagcgggtcgccgagcgcatagccgcacctgatccgaaaggtcctgcatcggcctcgacttaggagcacggagccgcttgagcgtcttctggaccttcttgtcgtgcgccttcttggcctgcgcctccttcttgctgacgccggccgagcggccccgcttcttcgacgggctgccgccgggtccgctccgagccttccgtttccgacctcgaccgggggcagcgtcgtcgtcgccgtctgatggctcatcgccctcgtccgagacctcggcgtctccctcgtccgacccgtcctcgtcctcctcggaactcggctgcgcgtccgagacggcgtcgtcgtcgctcgaggcagactctgccacctcgtccacctccttcacatagccagacgtttctggcgccttgcgcgctttcgatggcgaacgctgggtcttggatggagagcgctgcgccttcgacggcgagaccctggaaggagcggccgtgaccttgcagaagttctgcttgaccgggctcttgaccggcggctgcgcggataatggaagagagaacgtcaggcgctggttctgcgtggaagcaaccccatcgaaataatggagcgcaccttctcgatgtcggccggcttctcttttggcctcggtcggccggcggtccacgccttgcggccctttgagaggctcaagcgcagcgcctcgacctggaaggtcgtccagtcctttgcgcgactcgagctgaggcattcgtcaaacgcccaagcctcgccagatgtcgagtcggcgatgccggcgcaccagtagcgcatcgggatcgagagcttgccctgctggaacgagcccgcggcggcagggatgtcaacagtcgactcgaccttgagttggcgcgagccagccttcgtcctaacgatcgacccggtcggcgtcggggagacggcgacgagacagggcgagacgatgagcgacgtcggcagcggcggcgagaactcgtgccgggcgtccttgaacgacgtgtagtagagctgggtgtcggggtcggatccgctctgcttgagccgctgggccatcatcgacggcagctccttgacccgctgaaaccacttgacgcggacatacttctcgccaagctcctcctcggccgcctcggcgtcggctggctctgcatcaggcccggcctcgtcgtcggcaacgtgctcccacatctcgacgatgacgccgacggcaggcaggccgcgctcgacccggatgagcaccgtgtcgccgaggtcgtacgtcgtcggcccgggctcctcctcgttcttggctcgcttcctgctgctgaagaccggcggcttgcgctcaaaggccgggtagaagtcgcgccggttggcatggtacgtcggcgccgagagccagtgctcagactcctttgagctgacggacgcgccgcgcgagggcgaaggcgacggcaccggcaggccgcggagagcattgcgccggcgaggcggggtggtcatggctggctgctctagtgcaggacggtgctgagggctggcaggagccgaggcgagcagctgctgatgatgatgagcgagcgataggaggaggtcgtgaaggttcgagctcgagggtcgggacggcagcggaggcgcagcgcgccagctagcaggccagagatcacgagtcgctcgacccgtccaccccttccctaggtgagaaagtagctctcagatcgcatgaagcatcgtttgagctacgctttcttcatgccacatcgtccttgctagagctgggtcagggaagagggtggcgacggcgccgttatggttaactcctccgcctgcgccaggcgggcggatcgacgcgcaggtcgacgcatcctcctctctgcctcctgacgaccatcacgccacctctcttcagcagcagctcatgccaaagctgtcctgcatctcaccctccttcgaccggcccggacccctcgcttaatgtcagcccgctcgcccagcctggcgatagggcgcagatccgtgcgaacttcaccatcgatacattagctctacgtttgcaagcgaagtctagtcgcgttctttgatcgtgacgaggaacttgccgtcctcgaatgtggccgacacgctgcagaaaagaacagggagcgtaagcctgcggctggacttgatcggagagatgagcgacgcacgtcgtcaggtcctccacgtagaaggtcgggttcgcctgcaggcgcacagagaggagtcggggcgagtcagcgacatgcaaggacgcaatttggtcgcattaagcacgcaccgctcgaagggccgcgccgtcatgtccggtgcccaccccaaggaccttgcagccggcagcgaggcccgactttgcgccggacggggcatcctcgacgacgaggcctgcgcagaacaagagtgagtcagcgggaagcacctggggttgctgcagcgagcgactgatgggacgcacagcgcgaagggtcgacacccatgcggcgggcgccctccaggtacgggtctgggttcggcttacccttgctcacgtcgctgtcgagggccgggaagatgggtcagcattgatctagaaatcctgaggctcggtacgtctgacaatgaacgcactcggccgtgatgacgaccttcggcagcgggccgagaccagcagagagcatgtcgagggccgcaaggccgtctgacaacggcaaaggaacgagtcagccccagtccttctagacgcctgccttacggaccatccggcgggcgcaggacgtacaagcagccgtcgcactagtgacgatcgcaaagcgctccctgctgccctcgctggcggccgttcggagctcgcccagaagccgcgtcacgcccgggaggacgacaaggccctccttgccctccttggcgagcgctgccgcggtcgggatgatgccggcctcgaacttctgcacttcggctttcctgtcggatgggagggtgcgcgcagcgcggcgacgtcagcgggccgcgtgagagagaaggggtgacggccgacgtacagggcctcttccgacatcgggggcaggtacttgcggaacgtcatgtgcgtctggacgccgtgcgatgaggcgagcatgctgtcgaggtcgaggttgtacgtctttgcgaactggagccagacctggttgactgccggcgtgctgaggagcggagggtcggcccgggatcagcctacgaccttccgtacggcgcagaagagtcgcacaagtcgtagctctgccttgcgggagaacaaacgacgtcgagatctgccgtatagcgagtcgcaagacgtacgagttgagcagggtgccatctgagcaatcggagagcgggtcgggtcagcccgggcctttgaggtcagtcggcaggcgcccccctggcggcctcgagctctcaacgatggccatcgctcgtgcccagacacagtgcacgtccactgtatgagctccacccttgcagtgccagctcgttttgtctaggctcggcagcggcttcatcgttgcgaggcttgaagctctcaaggccactccgccccgaagtcacgggccgagctccgccggccatcgtctcagccctgctgaaccaaagagcagcacgcacccatgtcgaagaggatggcgtcgaactcgagcgtgtgcttgaccattgccgatacgtctaggggggtgagaaagaggagggtttcggatcgtcgtcggagagagtaaggccacccgccggcaagaagcggcttacttcggtgcgcgcagcgcgtcgctgtggcgagtgcacttggtcctcaggcgaaaaggtagacagatataactagtcgtttcatacaaggagcacgagggcagatagacaagccgggcagtgaccactcgctcagggcgtgtagcggaagccgggcgcgcggtcaaactgggtgatgacgtcgaggacgacgccctcctggggcgggccgccctcaaccttgtcgcgccggcggttctcaatccggtagtagaccgtcatgccagcggcgatgcagagcccgaggcactggaacgcgatgttaagcgcgcatcccttgaggtacttgggtccctcgatcttggggaagaggaacgaggcgaggatcgagaggcactggccgaccgtgttgagcatgccgagcgcgacggcgcgctgcgtctgggcgcccgtgttgtccgactgccacgagatgatgagcgggatggcgctgtagccagcagtgacctggagcaagcagacgggcaaggtaggatagtcagagggagtggtcgtcaaaatgtgagaccgaccggcgcaagacatacgacgcagaagcaggcaaagtagcgggccttgagcgcgccgaccgacgcgtgaacggggttgatgccgaggaggagcgaccagccgacgatgccgacgacaaagacgagcatgacggggatgccacgcgtccggtacatatcgctgaacgaggtcatgatgagcatgaagacgagcgagacggcgtaaggcgggactgtgtagagctgggcctgcgcagcagtgtggccgagaccctgagggatgaaggcgagggaggaggtcagcggcgccgtctacgcagatgagacagaagcagctcaccttgatgatggtcggaagaaagccgccgacggagccgaggccaaggttcatgcacgagtagcagacagcgacgacatacgtcttccagtcggtaaaggcacggacgagcgccttcttgtcgattccggtgtggccctcgccgagcgagtcacggttgaggcgggtcatggcaatgacgcgctcgtcctcagtgatgaagcgcgacgactgaggccgggccgggaggcagaagaagacgacgatggccaggagcagactcgggcagccctcgatgaggaagaggatgcgccactgctcaatcgccgtgcccttcatcgaggagactgaagattggtggcaaagaggtcagctacaacaagcgagatgagctgattggagccgtggacgcacctccgtacgagatgaggccgccgaacgcgccggcgagcgagccggccgagatgaagaaaccgacccgcttggcgagttcgcccttggtgtaccagtagctgaagtaaagggcgatcgcctggccgaagagagcctcgccgacaccgacaaaggcccggcagacgtaaaggccggccgggtttttcgtcgcggcctggcaggttgcggcgatggaccagatgagggctccggccgagatggagctgcacgagtatcaaagcgaggtcagagatcgtggaagagggcaacggggtgggcgagcccaagacataccgagaagggtcgacggccttggcgaggagcgtgcccgggatcgagcagacgatgtatgtgatgaagaagcacgagagggcaatagagtaggccgtgtcgctgcccctcaggacctcctcctggaggccctgcaggcgggcgttgccgaggttaccgcggtcgaggtaggcggccaagtagaggaggacggcgagcgggatgatgacgctgtcgagcttgcggacgagtcgccgctcggccttggcgttgacgaggtggtagtcgctgcacaagagaggcacaatgtcagttgggtgcagcggaaaggggaggatagtcgaggaagaacatacccggcatcggtcgcagcgtacgacgtgcgagttgcggtcgttccaagcgacttctcgtcggcgaacgtcgcattgcgagcctcgcggtgctcgacctcttgcttctcggtgtccatcgtaggcaaaagttgctgttggcggacgagggtgagggaatgagggccggcggaggggggtttggtagaagagggagctgagggaggccaatcccacttcatcctttatgaggccggtccgactggcccgagttcaagtcaagtagccctcggcgcccttcccccagccgaggtgactaggaccggtcctgagcagaggccagctcaggcaggtcggaccgaccgagcggtggccgaaagaggagtctccaacctgtcgccggcgacatgacgccaggaatagcctcgccggcacgctacagaggcccgcgaacgtctccgccgcaggcacgactcgtgtggcagggcatgttggtcccttgcgacctataaaccgacgtcctcgaagcgggctgtgttcggagatgcgaggccggatgcacgccgggcgagcgagaccgacgttggagggaggtgccggcgtcgacgcctgcccaaagtggatcagcccgctgccggccgctgcacgccacacgcttctgccggagcaagtcgggctgggtaagcagagaaagaagacttctctgcgtcagcctgagtgttcatgaatggcaagggcgtgccaggcctgcggcgtcgtccaaggggccgtggtcgagtcgtggcagctcggaaagcagccggcgaaaggacgagcgagcccggcgactgcagtcagcacgcggcaggaggcgacggccggctcgcctgttggccggcaagcagagcacggcaggtcctagagcagtcgtcgatgcgtgcaaagacggttgagagctgtgagctggcgtggtcgatgtcatggtgcgaccaaaggacgaggtcgaggcggccgcccggccacttgctgattcgacaccgcgtgtgccggtgcgtacgaaaccgagcggcgacgatgcactgacgaccgagcgaacatcctgacgatcgcctgagcagagacagcggcacaagagacaagctgccagatgggcaaggcgtgcgatacgagagacggaaaccataaagaatcgcacgaacactgagggaacgagaagagaggaagccaccgacggacgaagaggagcagagcaagcgaggagcgcgggccggtgggcaagccagagcgctcgaccagcgagactcttgatagcaggccgggtcaagggaaagaaaagaccggggcggcataggctaggatgacggcggacggcaggtcagcgcacgatctcgagagtgacgttgggcgaggcagtaggcgggtttgaggactgacgcgaagcttagtgaccgcgggttggagccgatgtttgcgacagaaaggtcgttggtgactgaatgaggagagtagatcgacaggtcagctctttgcggaggcggttcgccggtcaggcgtacatggccggaggcaagaacgcaccccaatgcgcggatccttgattattgttacagaggcagtagccggcgaaggacagcgcgccgagaggctggacaggcgcagatcgggaggtcagcgatagcgttggacgcttgcgcagtcgcgcagggcgtgccggctgcaccaaaagctcgccgcgagccgcaagccgaggaccggaggatcgaaggtagaggcagggcggctgaagcatggccgaggcgacgaccttggccaatccatgctcgtatggtgacaacggcgacggaaaagtgacggaaggtcagcgcagggcctcgagcgagatgtcttttgggggggggggggggggccgacagacgatcaagctcaacccgtcctttacgaaaggctactcacgcaagggctcggccctccacggcctgcgcgactacgcgccctcgatcgccgccttcaagcagggcctcgcgctcgagcccgagtcgacgctcctcaagcgcggcttggccgaggtcgagaaggcccaggagaaggacgaaggtgggggcgaggacccaatggggaagatgttctccgacccgaacatgattgcgaaggtgggtctcggctgcgttcttggctgtcgaccgaccgcgacgacgaggggctgaccttggccgacccctcctcctgctgcagctcgccgccaaccccaagacgcaaggcttcctctcggacccggccttcatgcagaagctccgcgacatgcagtccaaccctgccctctctgcgaccgccttttcagacccgcggatgatccaggtaattggcgtcctgatgggcgtcgacctccaggcgtttgagaagcccgagggaacggccgagaagggcgcgtttgacccgaccaacccggagggcgggccggcccctgctgcggctccttcgctgcctgccgccgctgcgtcgtcgtcgtctgccccaaaggcttcgcctgccccgtcggcgcccaaggccaagccgtctgcgcccgagccgacgcccgccgccgcgtccgagccgatggacgtcgacccgtcatcgtcgtcgtcgagttcggcccaggccgaggccgaggccgtcaagaaggagggcaacgaggcgtacaaggctcggcgatttgacgaggccatcgagaagtacgagaaggcctgggagctcttcccgaaggacatttcgttcctcaccaacctggccggtacgtttgcattacctcgccgctcgtgccgggtgtttgacaagctgaccccttgtcttttcttcctggcagccgtcttctacgagcagggcgagtttgacaaggcgatcgcgacgtgcgagaaggccgccgacgagggccgcgagctccgggccgactacaagatgatcgccaagtgcgccccctcgccctgcccctcccaccttcgcgcttggctttctgacctctctcctctgcacaatcagggcctacggccggatgggcacgtcctaccaggccaaggacgagcttgacctcgccatcaagttctacaacaagtctttgaccgagcaccggacgcccgagatcctcaccaagctccgggcggtcgagaagaccaagaaggacaaggacgtcgcggcctatatcgacccggctaaggcggacgaggcgcgcgaaaagggcaacgagctgttcaagaagggtgactttgtcggcgctgtgcgcgagtacaccgaggcgatcaagcggctgccgttggttccttctctcgcgctgctgctctggagttgcgccgctcaactgacatcccctttctctcctctcgctctgacaggacggaccccaaggcgtacaacaaccgtgcctgtgcgtcgactcccgtctcttccgctgttccttcctcacatgaggctgaccgctttccctcccactcccagccgcttacacgaagctcgccgccctgcccgaggccctcaaggacgccaacaccgccatcacgctcgacccctccttcgtcaaggcgtacatccgcaagtcgctcgtcctctctggcatgcgcgactacacgcgcgcgatcgaggcctgcgccgaggcaaccgacgccgacaaggagaagaagcacgcgcgcgagattgagggccagatgcgaaagtgctacgagctccagcagcaggagcgcgcgggcgagacggagcagcagacgctcgaacgggcgatgaaggaccccgaggtcgcggtgagtgacgcttccgtccttcggagatcttgactgagctgacggccctttttttcgatcccttcctgccttcgcagcaaatcatgcaggacccaggtccgccccgccctgctcctccctcatgagtaagctcccaatcgctgaccctccttcctctctcacttgcagtcatgcgcaacattctcgagcaggcccagtcggacccgcgcgcgctccaggaccacatgaagtcgcccctgatccggcagaagatcatgaagctcgaggcggccggcgtcatccggctcggctcgaggtaaagaagagcggcgggacagggtgcggtgcggctcgggcgagcggggaggcgcgacgcatacatgactcccttcttttttttgctcgaagcgcgagcgaccctctcgcagggagttgcaagcaagtacaagggcgcatgggatcgaagggatctgagggaatgacacctggccagcaggggtgcctcttttaatcgacaatagccgtccggcgatcttggcctagtgcgcagcggcggttgacgactccgcctgagcagcgagagggaggggaagggccaagcggtcagcgtcggagacctctcgtcaagctgcgctcgggaacatgacagacgaaccaacgaacgacgacatggcatggccgtagaagaggccggcccgggcaaggacctcctgctcgagaacggcgacgacgtcggtgaaaaggagcgcccagctgcctgcgagctcgcgccggtcggccgccgtcaagaggtcgactgcaaggacggcgccctcggaccggaagagggcgagcgctgtcgcgttgcgctcgtcggttgcgaggtagaagctgggcaaaggggcggggttggctcagcatttcggggtctgcgacgaatgcagtcacagagtggggctcacctgtcggtcaaaagcggaagactgagtgccgacactctgcgggctggcgaatgctgcggcacgctgtagggttcagaggtgccgtctgccctgatttcttcgagcgccctaccggaggtaagtttcgcaggtcagcaggagatgcaacagatgaacggtcagcctgagtggaggactcacgccaggcctcggctgagccgctccttgacacgggcgatgtgcgcctcagccgtcgactccatgacccagccagtcttgctgaagtcgccccgccgcgcatgagcgccgagaaaagtcctccctccgttgcgcgccatcagccgggcggccatccggtcggcaagcagcgtaagcatcggcggcggccggaacgagtcgagaactgcggacgaataggcgtcgcgtgcgagggcggtcgtaaaacgcatctggccgggcttccggccgagatgcgtctcgcctgcgaggtggaggatctgaggagaggtcgagggctgcatcaatagtgcgctcaatctaatcgtagagcctgagccgacgaacctcttgcggcagaccgtggaagtcgtcccaccagccacggagatcctctgcgagcgaggcctcaaggtccggctggacgactgactgtgtcatctccatgccggcgctgggatcggagacagggtcgaggggggctcgatcagtgaggcgagttggtgcgagaaacacggagcgactcacaatccggcaaacgtctcgagcgggacaacgccgacgtccgtcatccgccgccgaaagtcatcgtcagactcatcaggctcagcaaactcgccgcgcaggtccgaccaccggcgggcgcgcttcgtcttgttgccaaaccagtccaggacgacaaactcgaagggaggagcctcgacctcggttgcgtttcggtcgtcgccctcatctgtcgacggtggctcggaaagggcggccaacgccgcgtcgcgcgcttcgggcggcggcgatggcggcagccgaagctcggccgacaaccggtcgacccgcgaggcgttgaagtcgtacgctctcgagtcgatgcggacgtacgtcaactcttccccttgctctggttcatcggcgcctgcgccctggccgaggtaccgctcgcggtcgaactggccgtcggtgcgctcgctagtgacggcgtcggtcgggtcgagcgctcgcaggcggaggaagtcggcggtcgtgatgacggtccgagttgcctggaggtggtcgaagtcgaggaagagctgggagacgagcgagcaaagttatcagtcgtggacgcacatacaggaacaacaaggatccggcgcacctcaatcggcagcagccacgcccactgctcttcagccggtagtccatcccactcggtctttccgacggccgctccgcggttgaccatcgtcgcccagtcggcgcagactccgaacgaatgctcgcacgcccggccgacgacgtgtgacgggacgacgagtgtccggttgaggagctgggcctggttcgtcgaggcttcgaggatgtagcgaatgttgttccagccgagccagctgaagcacgcaaaggacaaggggaagggaagtcagtaggcgctcttgtcgtgcgaggccgaagagaaggacttgcagcggccaatcgcggacgaggtacttgccgccggttgactggacgatcactcgggccttcgcgaatctttcgtcttctggaccgaggataccgctctcaatggccgcagcgaggccagcgccagcgccgccgtcgtcgtccgctttcggccactcgattggcgattctcccgtcaccggtgactgactcgcaagagccggcgctccgacctcccagccgccgacggcagagatctcgcgcccgagggcggtccaagacggcgcgccgccgccgaggaggtagacgagccagctgacgctggccgagcaaaggaggaggccgccgagtatgaggcggcaagggaggtcgaccgacgaggacgagcgagaccgacagcggcgggactggtgaccggggcctcctgcgaggcttgcgggcctcgtcgttgacagggatcgctgaaagaggagctcgtccggctggccaatggaagagagggcgctcggatcgtcttcattgaatgctgatggcgccgacgttggcaggagaggcgcagtgacgtcccgaacggagaagaaggcagacgtggtcggctggccggacatcaacgacgagacagggaggatgttgaggaagggtgaacggagggaacggtgtgatgtggagaagaaggacgcgggagaaggcggtccacgtgcttggacccgacaacaagaccgaaagaagtttatcttagcaggaagagcgtgtgaggtaacctgtcgatgtcagctctagacggccccaggaagggagcctgcaggcgtcgagttcgacggggcagctggcatcgaactttgcttgcaagagcgtcgagaagacgcacctggctcgagcagatcgattcaagatccgtccggcgaaacgtcaaagaggtgtgagcagcgggctcgtgctctgctgctactgcttaacagaagggtgacaggacaggaggctgtcgctggcgccaagatggtcgaggatggtggtcgttgaaaggtgccagctagggccttgacccggcaggaggctcgagcatcacctcttcagctctgtgaccaagcggcgagagctcaacgaggcatcacaggccgggctcgggagagcttcggggccgtcttgcttgccgtgtcgggctgagcggggcagtcaagacggggcgccggccgacgtgatgacagcccggtgacaggtgccgccgttgagaaagatcgtgcgttgagccggtcagtgagggcttgctgggcgtcgtgtcggtctcattcgacggccagcaagcgacgtgctctgtccagagtgccctgcatgtcaacagcaggcgtcagtcgatactaggagtgcttcatctccgcgagtcgtctggctgcgtaacgtcgccatggcggcgaggcggcctccgccgagtcgtgacgcaagccgacggctcgtccctccgactcgacctcgatcagcccatctacagcccgcctccagcatgccgtcgtcctcagcagcgccgcagatccactttctcgacatcgcgtcgaagatggagggtgcgcccgaccttgattggctcgcaagccgagagctttgggctgacgactcgactccaccttcgacgagccaggaagcgagcagtcgtggtcgcccaacacgatgtgagacggcgaatgaaggcaacttagatccagcaggctgacccttagctccctccctgaactgtccttaggaagactcggctcgtcctgaatttcaagcggatcccgtacctgacctccttcctctcataccccgacatcaaggccgccctcgagtcggaccgctttccctcggacggcctgctgagcaggggaggcaaaggaccatggacgctccctgccatctgccctcctcaagacagcggcagcagcagcagcagcaaagcggccgactgcccggcgctcaacgagtcgtttgcgatcgctcttgcgctcgacaggcacttcggaacggccgactatcgccaggtatttcccgatcgggcgagtctggcgtttgcgagggtcgtccagggcctgttcaacgcgggcattacagcaaaggggtgcgtgcctcttgccgctgccgtcaacactcgatgttgatccctcctccgcgccagcctcaccctctggatccgcttcattccatcccacctcctcgacgaccgcggcgcggcctacttcactcgcacgcgcgaagagagctttggcaaacccctcgaccaggtcgggacgccgatggaccgctcggctgacctcaagttgctactcgacgcgcttaagccgatcacgcgcgctctcgccgcggcgaacgagagtggagaagagggttcgacgtcgtcaccgtacctgatgggcggcgagcagccgacatacgccgacctgatcgttctcggcttcctcgcctgggcgcaccgggccgagctcgccgccgggccagacgtcgagccgaaaggaggctggttcgagccgctgctggaggctgacggaggggggctcggtcgcctttggaaggcagggagggagctgataaagggacagggaatgggcgtcgtcgagtggaaggcgtgaagagtgacgctcttgcaccggttgcattggaggaacaggccatgttgatacatccatgatcgactaaaaggcaggggtaggctgtcagcaagtgaagcgactgttgggctgggtcttggaacgcagactaacaatgtacacgtctaccgctctaagagaaagcgcacaagagccgccgctcagaggcagcactcgcagcagtctttgccagggatgcggcccatcccgcgcggaccgagccactctttcctccgcttggcccagagagcatcgagcgtccgctcgaggtcaaacaggccctcctccttcgccagaggccgcagctcgtcgatcagctcaatgtcgcgctcgagcgacgagacggagagcgtgtcggggagggcctcggtccggcgcgagagcgggacgggcgtcgtcgtcccggagacggggcgggaggcgaccatatgaagctgagcaaagagagaggcgagccgggcgacgcgggcgtcggattccaaggcgagcgactcgggaagggcgcagccagggcaggcgcactcgaagcctggagcgcaggacgaagcgcggctcgtgatgtcagcaggctcagggaagcgcgaggagcggaagcgcctggcgacccaccgaggacgtccagcgtctcggccttacgctctgagatcgacttgtagtacgagtcgaggtacatccagccctgtgtttgacaaagagggcaggttgtaggcagggtgagcgcaactcgagcttgcggaggtgccgcggaagcgaagcgcggctgaccagttcctcgccctctgcaatgtcacgcccggcccagagccgaatgacgccgtccttggcgtcccacagcggccttgtcaagtttggccggcagcttgagttgacgcggctcagaagcgggaagaggccgccctgcgagaggctcgtcgagacggcgttcgtcttgaagacggcgtacggcggcgggagctctgggtgcgtattggcaagctcgagcatgatgcgcttgtccgactcgggatggggcgccatgaggtccgtgatagcgcgactgtcgccacagggtggcggcagggcaaggcaggcgcagcgggtcagccttgctgtgtctgaggctcgagagccgccgccaagcgcaggcgacagacccaatggcgacgtcaagcgcagagtagcccttggcctgctcctcgacggaagggtcaacgtcgacctggcgcgagaagaggaaggccgcgagcggagcgtcgctgtcgacaggcagggcaaagtgcacgtcagcggtcggcaccctgctgcaagctgcacgactcggccgaattacaagcggaagagcggcgcctcctcgatgacaagctcgcccttggctatcggccgaacagccacagcgccgagctccttgagcgggatcggcctgacggcaacgagcctggcgagggaggagtgacaggggaggtcagccaggagagctgctgaataggagccgagcttggttgagacgcacggatgcggcgggattgagtccggcactgggtgcggtgcgaaattgtcggcaggagcagagctggccatgttggagactgatctacaggcagctgcagggatgagccgtgacagcggtctgtcggctggtcgtcgtcgtcgtcgactctccgaggcactccacgcgaaaacgtcgccccggaagccggctcccagacgggaagaggttcccacgtccgcccgcgcttcgcttcgcgagtcgtacaacaagtaggcatcgtgaatggcagcgcaggcagaagcaagagggatgaggctcgtgaaaggggggaaggagagcgtctacttatccagcagggcgtctagacgtcggagacacttcaatggacgccgttgcccgcctcgagcggcaggtcgagcaacaggccgccaagaccgacgtcgatcaggtcgagccagcggccgaggtcgatcgccgtccgctcgagctcgtggtggacatcgctcgccgttgcgagcctgttgtagtcgagcggtcgtaaaggcggctggccgtcgtatgagaggcccatcgccgtcgccgcctcttgcgacggctgccgccgatgctgctgctgctgctgcagagtccccatcggcggtgacgctggtcgagtgccggcaaagtaggcgtgtcctccatggccgtaggagctcgggctggccccgcctgggctcgcctgtgccgccgcatggaggtttgactgcgagtgcgaggcatgcaggttcgactgcgagtgcgaatggctaagcggcgacggcagcggcagaaagttgaagcggttggccgtgctcgagtgaactgagggcgagggcggcaagaggtcgttctggccagcggccggcatcggcgccatcttgaggacatccttgaggctgccgccggtcggctggaggtgaggcgtcgtcgcgccgtatcgaccggttggcggcatacccgacgtcggtgtcggtggcggtggagggtagggcgaggtgaaaccgctccggtcaaagccctcggaatgctcgccccgactcatgctccggttgcgcgagccgctgacgaccgttgcgcccgtcgtcacgagagccgtgttgttgcgcgagacagccggcctcgggactggcgagggcagggcaggcgcaggcgaggtctccatgacggcgacactcgcttgccgcgcgatcgacggccggcgcgtccctggcaggcctcgcagcggcgattcggacccagagcgaaacatggccgacggaaactcgggcggctcgagcggcatgtgcagcttgcgattcctgacttgcggcgacgacgacgagttggaagacgaggtcgagtcgatcgaggccgtcagctgatgcctcgcccgagatgtcgacgcgacgggcgactgagccgcagcgccgccatggctatcgctcgacggacccgagccgttgaaggccgacgcagacggaatggtgattgtcggcaaacccttggtcgagcggacgtctcggtacgtggccgtactcaggcccgagcttgaaagggacgaggtgaggccgaagctctcgccaggcgtcttcggcaggcctgacgaagacgaggtcgaggcgctggaccggtctctccgatgctggcgccgcgtgctcgcattgtagccctcgctcgggcccgcgccgttgaaggcgttgggacggatcgtgctcgttcgagactcgggctcgttgtcgtcgtaccgaggcaggctgagcagtgcgctcgacgacggcgagatgccgccgttcgagggaccggcgcggaacgggtctggcgttggcgtcggcgcattggcgtcctcaaagagatgccggagcgagcgtggcgctgtcaccggggtagcagccgtgggcggtgtcgggaactcggtcgacgacccgccgttctcgctcgggcggaaggtctgccgtcggcatgcactcgttcgtgagcacgcagcgtaataaacggagacagccatcgttacactgacgttgaagtgccaggaatcgtctgggttgccgtcgaggccaaactcggagacagcgcctgcgtcgccatacatgctcatgacgagacttgtccgcttattgccgcgctcgcgccaggcgtccatccggcgcaggagctccctcagcggtgcgagcggctgcttggccgccgccttgatccactttgacttgagcaggtcgtcggccgagagtcgctggagtggcgggaagaggagtcaggtggatcagttgatcgcccgtctcgcctatgagccatgcagaggactgggaccgacctcgtccggcttttcgttaaggcagccggcgacaaaatcgcgcatctccctcgaccagccgcccccatcaggtaacctcggcggcttctgcttggggatcatcatgatggcccgcatcgcgtcctcctttgcgagcggcggctcgccattctcgtcggcgacctcgagcacggtgatgccgaggccccagatgtcggcctttgtgtcgtaaggctgaccgaggatgacctcgggcgccatccagtagggcgtgccgataaaggtcgtccgtttcgacgttgccgaagacgagaggaagagcggggccgagacgccaaagtcgcacagcgtgacgcgcggctgcgagttgagcaggacgttggcagctggggaggcgcaaggtgtcgaagacgcaagtcaagctcgtcagcttccgaatagcctcagcagagccaaccggacagcaaagcgtcgacagcacgcacccttgatgtcgcggtggatgatgcccatcctgttgaggaacgagagcgccgtcaggacctccttggtgatcaggacgatgaaccgctcctcgatcgggccggccttgcgctgcgagttagcaggaagtgagagttcgtcagctcgagctcctagggaccagctggtagcaagagttcggcatggcagccgagcttgcgagctggacgagggcagagccggcctcacgagcgttcggaggctgccaccgtcggcgtagtccattgcgatccagaccttgggcccctccatccagcagccaaagtagcgggtgacgttgttgcggtcggcgtcgccgttcttggtcatgctctggagcatgccgacctcgtgctggatctcggccgtgtcgtcgtcttgggtgtcgaggtcaatgaccttgagggcgagcacgaagccggtcggctcgtggatggccttgtagaccgagccgtaggcgccttggccgaccttgtcgagccgacggaagagttttgaaggcggcgcatcgcgtgggatcgacggcagcgtctgcaggaaggccgactcggacggtaggggtgccatggctcgaccgagagcattaacgtcggagggagacgaggttcggccggccaggctgaaagaggcgcgcgcgcgcgacgagcgctgagaggcgcgcagcagaccacgtcggcgccgacgcgagagttcagaagggcggcagcagtgctggcagcgcggcacagcatgtagggagtccccgaagacgtctgtcgctgtaagaagggaacttgtagctgacagagacggatgctttcgcaaggggccgatctcgctcgcacaggccagcgacgactcgcggcattcttcatctgcgcggctgacagctcattctcatcaaggtacgagtgtcatcaagagacgcaaaagggccgaagataagagcaggcgagtgatggggggccagagaaggaaagacggctggggcggcctgcgacagagggagggccacgtcaagaacacgtcggcccgacaaatgcagagacgaacgatgagcgatcacttagccggtcgagcctttagcaaaggcttccactgacgctcctggacgaccgcctcgagcttcgagagcttccggcgcgagcgtcgggctgggcacgtctgcagtgcctgagggtcgcaaccttcgccgccgctgacaaagtcgcccgaggcgctgtcgtagttgcagaagacggtgaggaagtctttgctgtttgtagggcagaggggaggacgtcagtggcttgaaggaatgcagcgtgttggacgcctccgacggcgacacttacaggcggtagttgcactcggtaaaggccccatttggtcgtccttgcgtatcagagacgggaaaggcctcggcgtagagcggcggacactgatagaagcagttggttccagccgagggctcgaaacgcttgacgtgctcgatcccggtcgggccttgcacaaaggcggcggatgccgagtgcgcaagcaggacgagggcgaggctgccgagagcgggtttgcggaggacgggcatcggtcgagagagaccggggaagggcggttaaagaatacaggcgacaagatgatggtcagcgagaaaaacagagcgggtggcctgagccgctgcaaggggcgcgttgaacgaagctgagttcacgagggtccgagaaactgcgcatctcgccgggtccgacggaagcgaggccgtagctgccgggttggtccttctgatgctagcttttctcacctgtgctcgcacgcctgaaggtcaacggagcttatctggcaagtctcattgcagaccgcgcagaggaagagggcatgggggtgcgtccggcccgagaggacagccggacggaggaacggacagcggaagcgagacgaagacgaccattcgcagacgagcgagccgacgaagctacgtcacgtcggacggaggacgacttcgagcgagtctagtgggtggccttctgctgcgaaagttggaagaggggcaggggtgcatgcgcgagtcaggacgcgagtcgagagcgacaacagcttgcatgtgggaaagcttaccttgtggacctcgctcttggctccgtgcgaggcgctgtccttggcgtcctgcagagaggagttcgaagctgataatcagcgctcgtcgtcaggtgatcaggtcgcggagataggagggcatacggtcatggcgtcgacggcggccgaggcacgcgtcgtgagcgaggcgttggggtccttggcaacctacgagagcgggcgggaaggagaggagcaggttgagtggaacagaaaagaggcgcaggtcagcgagcccttcgacaggaggtgtagcacaggccgacagggggacacggacctccttgttggcctccttcgaggcgtcggagccggtctggagaacctgctctttgacgtagttggcggcgtctgcaagcaattaaaggaggtgttaaaggtcagtagcgctggaggactgagtggcgggctgagatgggggccaggcgagatggctcgacaggaatgttgactggccaggcagacagggtgccgctgacgaggacgagagcaggaggggaagacacactggcggcggtctccatggtgctagctgagggcttagggtgagggtcgagtctggctgggagagtgttggggtgggctgcaggggaagggctcgaacggggtcttccagtgggcgaccgagagtgagggcgatagcgacgggagcaaagacgccgcgagaatggacgacctctggtgcgtcccctccccctctgtcggatccggccgctctcggctgatctcgcgcgcgtttccagggacgagtcggacatggacgacgaccactactttggcgacgaagagggcgacacgaccgactcgttacccgaggacgaggtcgacgaggcgatcaagcgctcactcttcgatgagcaggcctccaacgccggcgtcgacccaacgcctcagccgtctcttgccctgtcggcctcgctcgtccggcagctcgcctcgaccaggtccgacacgcactcgacgccgtcgctcgtctcgcccgcgctctcggccgcaaagcccgtcccgctcgacggcggcggccagcccggcgcgtcgccgatggacatcaccagtcaccctagcccgcccctgccgccgccaatagcccgctcgccttcgatcgtctccgaggccgcgaccgtctcgtccgccggcgacgcctcccgccctcgaccgaccgtctcatccgccaccggcacagcactccgcaaagcgccctctgcgccgccgaccatgggctgcttcatccccgtcccgagccctgcgcgcttccagagcgtcatcattgacggcgcgggcgattgcgagggtggcgcgccgccgccgacgccgtttaccaggcgcaagtcagccgagaagaatggcgcgcggagtcggggccagagccttagtctcaagacgggcagcacaggccggaagcgagaccggcacaacaaggtgcgcaagcgagcgaaccaaagcgcgacgcatgcgtctggagctgatcctcttctcgcgcggtgcgcaggtcaagcacccgttcgtgccaaagacaaagcggacccgctatggctcgatgacgccctcgcgcatgtcgcctcggccgcccctgcgcgaagacacgccctcgtcgcccgacgtcgagcccgtctcgctcgaagacgtcctcgacacgtccctcttccaccacggcctgccgtcgtcgacgtccgacccgagtctccaccagagctcgacgagcgcgaccgaccgcgagcgcttcctcgccgaccactcggtccgcaacctccggcgctgggaccgcgtctcgatcggcacgttccgcggcaggctcggcggcgtcggcgtcggcggcgtcccttcgcgaggggcatttgcctcgtcacaagcgactcggccggtccaccatcatcaccacgctcacaaccacctcgacgtcggcagcggcggcatcggcggtcggccggccagccagggctacgaccactcaccctcaaaaggctccatcttccgctctgagcaggagctcgaggcgccccggagcggaggggccgagcggacgctcgtcatgagccccgtcatcgctccctctggcgctcagccagccaagggcaagcagcgtgagctcgagggcttcgtcctctagcccgccctctccttcttctttctccatctttgtttctccctcttggtaaccctcgtcaaaacttcattcctgcggcacccttccgcaacccaccctcataccatcatcgtctcgcaatcacgtctgcctccacccttgtttacgccaaaatctccgccctctctctccggcccgctcaacgcccaaccggatgtgcaatacaaaaaacgtcctttccgctgctgtcgccagtttgtcgcaaggagggcagctccatcgcatctctaggacgtcccccgctggaggatgcacacccagttgtcgcgctcccaaaagtactcgtcgatccggacccacgcccgacctttccgctcggccacttcgcgcgcctcgcgcaccgcccgtacttcggtcgactcgtcggcaagcgcgagaggcagaaactggaggttctcggcctcggcggcagaggcgacaaggtcgacgagctcggtcccgcggaagaggtggtagtagcgctgatagaccttgggcggcgttgctggccggggcggcggcgaggagggcggcgtgggtgccgaggtggatattggcgctgcaaccggcaggtctgcgagcttttccgtaactgcatcgacagcaggatcggcctgcgtcctcctcgacggcccaggagcgtcgtctgcctgcggcgccgaaggccccttcttggccttctgcggccgtcgcaccttctcgcgcttgacgcccgcgagcgcctcctcggtgctcttcggcgcctccttgctcagcacccagggaacaaaaacgtcctgctcgccggcgccctttgcaaggtcctcgcccggtgcgtgacgccgcgagtctttcgactgctcgagcgcccagacgtagaccatcccgcgcccggcagagggcgtcaatgcacggaggaacgtctgcatcgtctgcagtcggcgggccgggagcgagatgtggtggagcgttgcgatcgaaatggcaaagtcctggacacgaccgtgcgaggtgagagtcagccccggacgagagacgacccttggaaggtgagaaggcaagaggacgcgacgcaccattgagcctgggcggacgcctccaaggtcgagcacgtcgccgacgacggcctcgcgcagacccggctgacccggttcgtagccgcaccgcctagcgagctccagcagcttgtcgctccggtcgaggccgaccatgaaacagccttttgcccgggcctcgttggcgtcccaggccgggagatactttccgttgccgcagcctgcatcgacgccgagcgagccaggagggagcgagtggaggaactttgtgatggacggccagggcttgtagcgcgtcgccgaaaagtgggtcgcgatgagctgcccaagggaggaggagggggggtcagctaggccatcaaggctctgaggcgagggccgagggacgaggcgaggcgaggtgaggcgaccgacattgtacacctcgtggacattctcctgctcgtattgcgctgccagcggctcctcaggcgagggcgcgaccgtcagcggaggagccatccctgatgcgttcgagtcgacgatcggtggaggagcagagctgctgtcgaggggaggagatgctggccgtcggaggttggactaaccggatcaaggggtcccagatgggggtttcccagagccgagcgagatcttgtcggatcgagctcaaaccttgcctacgggaagaagaaaagggcgctgattctggaactgccgcctaaccgaggggtcgctgaggccgttcgggcggaatcgaccgggggagggtgagtgacgcctgcggaggcgggcccgtgggggggttgaacaaaagtcgtccgacagcagcaagagtggtaccgttgggttcctacaatccagtagatgctaccaaaactcgtccaggagcgattcagtcagatggtgaccgtctagcttaggggggaggggctcgctcgcgcgtcctcgggcgcaggtcgctgggctgctgcgcccgccagcctgcttcgacctgtcgcccccccccccttcctgcctcctgttgacgatcactcttgacggccaatcccctctttgccgtctcgcagggttcaagcaccaaatcggctccgtcaagtggaagctctgcgtcccgacctgcggcgacaacgcggatgacgacgacgacctcaactgcctcgagggtgccgtctggaaggacggcgtgcgtccttcctttcctcgcaaccctgcttgccggcgctgaccccgaccttcactccccgcttcacagcgctgccaggtcgagacgaaaccgtcgtgcaacccttcgactcacatctggtggtcggccggcttgcgctgcggccaggcgaccttgaaccgagtagcagtagccaggctcgcccccctcttctcatctctttatctcttaagacgacgacacaggagctgtcgtctggcagtagtccagaggctgtccaaaggctgctcgcagcacttgctcaagcgctgagtcggtctatttgacggcgtggaacgaatggtcttctcttcgtgggccgctgcgcctcggagcggcgacgatgagagccaaacgaaacgcaggtcgctccgcctccctctcgccgccatctccccttcacccttagcttgacctctcaccaagatgtcgtacccgcccgacccgtcgccgatcgtcaccttcccgctcgcatcgctcacccaccacgtcggcctctcaagcttcccgctctcgaccggtccgtgctcgctcgtccagctcgagggcggcgtgctcgccctcagcatcaactcgacgacggtcgtcctcggcaaggagaacaaggttcgcaagaccgacccgaacgaggtgcgttcccgctctcctcttacgctcgccgttgccgagcagcggtgtcagagggcggcccgaccgaccgtctcggcgtcgcgcacggccgccctcctgcttccgacggccgctccctctcctatcacctaggctaacctgtcatgccccttcctcccagcaacacgcctcatactcattcaacttttcgccgacaccggaagctcctgtcgcgagctcgtcaacgtcgacagacctgccgacgaccaacgctcagagcggcggctttctcaagctgaccctcccccagtccaagaacaccgaggaggtgggtctaagcgggccgagagcctcggatgacagtcgctgactccttgctgcgcgctcgcttccagtacgacagcttgacgctcatcgcgcgccaatttgagggcgagctccaatcgcacggcctgctcgacacacgctcgccggccgaaatctcagaggatgctggcgagtcgctctcgaccgtcctgaccggcttctaccgatcgtccgtctcgggcattgcccagacggccgggagcgtctattctggcgcgcgtgagctcgcggctgaggtcggcaaggagaaggagacaaagggctggtggggcgccatcaaggaccgggcgggcaacatcggcggcacgcccctcagcagctaccgcgagaccggcaagggcaaggagcgcgaagagtttctcgacgtctcgctaagtgaaggcgctgggtacgttttcgatctgcccgagcgaggagtgcggcgctgatcgccctctcacgccctcttgtccgcaggccgaaggagaccttgaccgcgcaggatctggcagccgtcggcaagccgcagcacgcctcgaaggaggaggccgtctgaccggcacgttgcggctcaagaattcagccgacacttgtcggtcgcctcctctccctctcgcaggctgccagccaggctgtcgagcgttgacacaggaaccccatcgccgttccccagccctctcgaaacgcttctgatccgtccgacacttgtaatctcaatgctcagcatagagtacggcttacggcaggcgacagctgtctcttctccagccggtctctctttcaaaacgaatggcctagcctcgctcgtcagatgtcgattgctgcctgacgaccttcggcctccgcacccttactctctcaacgcctgtcgagcaattgatcccggctggatcgcaagtcttgatgagcgaggggccagaggaggcgttctgctcttctgcttggggttgtgcgggccgttagcccgagggtgcttgcgccggcgaaaaggaggcatcccttcgtccatggaagagaggtggcctcctgaccctgcctgctcgttgcccgtcagcagttggggaaaaacaggaggcgctgctcgtgctccgggagacctagcagactgaccgggcgatcgaagggctgtccgacagggtgtaggcttcagatcgagtgacggccgcttgcgcgctcccgcctgtcgcctgatgctcgggcagagagggcaagccgcaagacccaagcaagcactatcgaccgcctggacgacgccacttcgtgctcccacctctccactatggcctcgacccttcggtcggtcgctcgctttgagccagcccgagcaggccgtcgacaggccactcgagaccttcggcggatcggctgcgcgggcagccacacagaaccgcgggactcgatcgccccgcgcccaagccagaggaaagctccccgctgccggccgcccgaaacgaggcgccgtccctcctcccggctggaatggagcgagcaggcgacatgggcgagaaggggcgcatggtcggggagaggggcagagaggaggggacaggactgaccttcaaaggagcaagacctgtcgctcacccctctccgacctgcttcgtctcctttggcaacccccctaacccgccacctctttctcgtccgccttcgttcgtttgccactgttcggtcggtggtgtgcgtcccctcttcgcaccgcttcttcggacgcttgcatggagtgcgtttgctgacaggagctcgccccgcctcccgctcaggaagccaagccactcgctcgctcgctcgctccctgcaacgaccagctccgccatcggccagccttgacgaccgtccttcgacgacaccttctcaccactcactaccgccagcacttcgcccgagcgccgatccgcaattcgctcgagcatgccctcgtttgcaagcccggcgtcgtctgaccttgccctcgacgagcagcccgaggccgcctcgacctcctcctcctggccctcaccagcgccaatgtcggtcgaccggtatcctcacagctcgagagacggcctccgacgctggagcagcgttgaggaggccaaagagtccctccgcaacgtcattgatgatgccgatctcgcgcaaacgccctccgacgcttcctctgccggcgtgaggggcgagcacggcgacccagcgtacaagcgctggcgcgcggctgccggcctcgagagcgccgttgagtcgatcgacctcgcccgggaactcgacggcgacgacgacatggtcgagccagcgcaaggtcagccaccctccaactctcgctctactcttcctgacttgagctccggccgctgacgcatgcttttgcgctcggatctcaggctgcaactttggcgcggtcgggcccgaatcaggcgatgctacctcgacgacggccgccttcagctcgagcccgccgacgcccgacgtcagcgagggcggcaacgcctgcgcctttgccggcggccacggctcgccgaactttgacgtcgacgacgaggaagctgttgctgtgcaaggactcttccctctcggccggccgatcagcagcatcttcttctgccgagatgaccaggacgacctcgtcccgccgtgcttttttgtgcgtgtgcccgctttctctctcggatgcaaggattcgtttactgaccagcgcttgatttgcctttttagcctggccagacgatcccgaccctcgtcgttctagaacttccgcgctacacatgcctccctcaccggctcgctccggcgctcagcatctcgctcgtcggcacactgcgctacctaaccgccgccatcggcgacgacatgaccgagatcgacgacgacgacgatgacgacgatgagtgggccgagcgcatcctcatcaacgtcggcgtcggtctcaaagacggcctcgacctttggcagaaggacgcgaccgtcgcatgggagcggctcagcgaacggcgcaagaagggccggtcgaacccggccgtcgcccttccaggcggcaagtacacgctgccgctcacagtccaggtcccgtcgaacccgacgctgccgccgacgtttgacctcccaacctcgccctttgagatcgcctaccacctctcggtcacgctcacggtcgacgacccggcatacaactcgtccggcccggccgaccccccgtcccgcatcgtcctcagccaaagcatccgcagctttgctctcctcccgacgactctgccggccctccctccccatctcgcgcccatcaccggccttctccaggcaccgaaccggcaccgcgagagtttcaccgctatggtcggctcggcctcagccggctggctcgaccgcttcaacacggccatggacccgctcatggtcggttttggcgtgtcgtctccgcgatcgccaagcgctgccatcgcttcaaccggacccgcggccgatccttctccaacgtcgtggtcgatcgtgccctcgctgccgacgacgtcgttctcgccctcgtcggtcatcccggtcgactttgccctccagccgccgtcggccttgccgtcggcgcttctcccggccggccagatcatcatccgggcggccctcatccgtcgcgagttccttcacacctcgctcgtcgtcccggccgcgagtgacccgcccgagggcctgctctcggaggaggttattgtttcgtgcatcggccggcacgatacggcctcgatcccgagcgtccgtccatcgctccctcgcctttcggtcccgctcggctttggcagcggccaaggctggacaagcggcttcacgtccagcctttcggtctcgcccggatcggccttccaccggacacatgtccactgcgcctcgcgcttctacctctcgctccaggtcgcttttgctccaacggcgagctgcaactcgcctgcgaccgacggctatctccttcatgacgacccagccggcatccccttctcacccgagctgatggctcgagcgatcctcgttccgatctcgatcggctcggtcggcgagccgcccggcgcaaatcgtcgggcctggcgcgagctctacctcggccgaaacgaccagacgggcgaggaggtcccgcagctgatcgacgggagtgccgtcgacctggacgaggcctggatcctccctccgccgtcgtacgaggacgcgttggtcgagcctgtgtacaacgtctgacttgcctcccttcgcctcgcacccttcatcccctctgtatttcactcttgacgctgccccttagcactccaacctcccgcatgcacctcttccgatgttgtctgtccgcccccacgctagtcttgctgcacgacctcctctgcttcacgcttcacgctacctgctttttttttgccttctcttatgcaacctttctcttgagtgtcgccctatctatgtagtctccttgagagcggcgtctatgttggatcgacccttgctcggctctcgtgctcgcctgaggtcaatagccaacagtcctcgtgtcgcagagcggctgctggaatgaggtggggcgacactccgttccatcacaagaggtcgaatgttgaaagcgaagggtcatgaagatgagagcagcatgagagtatgggaactagaggtacagagctgagacagcgcgagcgacgacatctactattggttaggctggacgaggtgtgggtgcagaggggcaaagcaggggaatgggcggaccaagcaaaaaagacgagtagatgtagagaggaggagatgcaagcgcaagaagaccaaaaggaagcagagaggcaagcagaggtagggaggctggtgaggaaaggcaggcggggcggaacagagcctagcacttctgccacatcttgacgctctcgatctggaggccgcggtcggtgccggcgccccaggtcgggagccaggtgtcggaccgggtcgcaaagttggacatggccgtcgtccgctcctggccgttcttccagggcttcttgtcgttgaggttatcgccaaagtagttgtcgagcccgccggcgccgacctggagccggaggaaaaacttctggtcgaacggcgcaatcatcgggttggtcgcatcggcccacgggttgacgatgacggtgccgttgcccgtcaggagcgcaaagttgccacgctggtaaaacgtcttttcgccaaagcggaggttgaacaggccgtagttgcgcgtcttgatccagataaagaccttctcctcggtccagtcgacgccaaaggtgtagaagttagtgttgaagaacttgcgccggacgcggtggacagagttcgtgagccagtagcggtcttccttgaccatgcctgccgcgccccaatggaggccagactgcgcggcattgttaagcacgtcgccttggctcgtcgcgacgttgccctttgactgcacgatctgtgaaaggcgacaaggaggggtcagtctaagagcgcagggatgataagcgactgatgaccggggacgaacgtcgatcaggccagaggcagggaaggcgccgtaggcgttgtcaacgggaacgagcgagatgcgcggccagagccagtcgccggttggcatctttgcgttgacttcgacccggccgtacttcatgtcgaccttgccgcgagtcgtgatggaggccgagcggacgggggggatcgtgatcgacgagtttctgtccgaggcgatgatgcaattggcgggcgtcgagatggtgcagtgctggccaaggtcgaggtaggtgttgttgctgatgccgaacgcgaggtcgccggcctcggacgtgagcgaggggacaatgttgagcgcgccgtccttgacaaacgagttggtcgggctgtttgagtaccagacaaagtcgtccgagttaccgccgccgatcgacgactcgtgctgccagtaggcgctgttgagcgagctgccgctaaagtcgtcgtcgaggatcgggcagaatttgctccggtcgacgccggcgtagccgctaaagagccagggcagacgaagccatcagccgttgactctttgcaagaaggaaggcatcaagaggcagaacgcacgtgtagagaatgtaggcaccgccggcgatgccgaggaagatgccggcaaggaagaggccgtacgagatgcggccgggtttgggcgacgactgggtgagccagggcttctcgaccggcatcgagtcgtcgagcagctggctcttgaagatcggccgcttcttctcgctgacgacggcgtccggcccgagaaatgacgcgctcgacgaccgcgagtagacgggcatcgagccgttccggttgtggtgcgagcttttgcgggtcgcctgaccggaggagtgtcgagcagcgacgacaggtgagccgaggacgggcgaccgggtgaagaaaccgctgctagtgctctcgttgcggaggtggctcggcgtcgcaaaggggttcttggcggggtcgtcggtcgacgatgacgagttggtcaagagcgagcttggccggctgctcgtcgacacagccgatgccggaggagcggcgagcgaggcctcggagctgtgcgtgctgctcgactcgctggctggtgctgttgcagggtcgaagggcgaggcggacactgcgagggaggtatggctgggttaggaaggaaggggcttcggtggtccagcgcagatgaggcaaggcagaagtcgacgcactcttggaaagatcaagcgaagggcagacggagcacagcaaaggtcaagcgagaggaggacctaggagagcaggaacgaaggactggcagtgcggcgtggcaggcagatgaaggggggaaaagacgtctctcctttgacctgtcgcccttctaaggaaagggtcagatgcgaggacccccttcccaagcccatcttcgactgttagtgagcgctcccgcaggtgatctgtgtgagcgtcgacggtcgagactgaacacccacccggggaccgaccaatcgccaagcaagtcgacgccgtaagccggcggccctgcccgtcgacggacgaggcggggaggctggctgcccggggcaagggagccgggctgcctgccctccggcaagaggcattcctgccggggagcggccatcggcgcaagcagacggggtcggagattaatcgagtttgtcggcggagggtcggaagcggccgtcggctcctgcttgggttcgaggccctgcgggcggggcccggtcaaagggggcggcggcgcgggcacctcaaacagcttcccgcgccctcggtcgtcgatgcccacggaccatgacccaagcagggcagcgaacaagcagtttgaacagacaaagaaaacgccaaagacactagtcaatctgccggcaggcagccgggcagcttgcttgagcacctgtttgctcacgccatcggccggccgcccgccggggagaaggggacaaacggacggctcggcctcgacatgctgctgctgccgccttggctggggtgcctctcccaagccaagcgggcagcctgtcgaccggcgagcccatcaggtcaagcgattctctcgttgtctccttttcttcttacccccatcgtccttcccttcctagacctggctgccagactcgacgagccgtgccctcctcctcggcaacctcgactgcgctcgcctcgccctgcgctcatctccctacggtcctactctgctcgcccgacatgagcactccctcgacctcggccggcgcgtcgcccgccagctccttcgttagccctgctcccagcactagccgggtcacgttcgcgcaccggcccgagacggcgagcctctctcaagacgaagcccggccgctgaaccggccgacgcacgtccgtcctctgatcacctggcagtctcccgttttcgagctcctctgctgaaatccctcttccctgcggctttggctgtgctccagtcgcgctcctggtcaaacacctcacgcagctcgaggctgacgagagacgactcgtccgacacctcgtcgtcgcgcagttacccgcgcctgtccatcacgcagcggcaagcgctctcgatgaaggcgtctccgtcgatggcatccgacgtcgaccggatcgaggacccgagtgcgtctgaggcgcgttttctcctcccttcgcacgctagaattaacccttttccgcacacccccctctcgcagccacggttatcgtctcgtccgagcaactctttgccgagcacgtttaccgccgggcccgggcacagggctggttccccgacgctgcctttggcgtcgtcgccgtccgcgtctcggtcggccactacgtcacgtacccgcacatcgacgagctcgacgggagcgacgagctcctccagagcctccgccagctcaactgcgcggcggcgatcctgaccgggacgcacgtcgtcgagcggatcctgcgccagacgccgctggaggactcaatggtcgtcatgacgagcgaccttcaggtccaggtcattgacgccctctgctttctcggctcggccaaacgctaccgtacgccggccctcctccgtcagtctgcagagcacaagatcgagggactgacttgcgccccgcccgtccactgctcccactgcgccagagcatgccgccttcatccgctcgacgcaatccctcgccctctggaccgacaacgcgcgggagctcctcggccagctcggaacgatgcaggacgccatgatgacgcacatctggcagaagaaagagctcgcgctcgggtcggacgagggcggcgcggctggcacaaacagccgctcggtcttccaccaggcgtcaatccaggtcagcctcgcgaccgccctcaacgtactagccaacgtgaactttatcggtaagccccgacggcaggtctccgctcagccgccacccgttgactaacgtttgctcatcgcgctgtctctgcagccaaactgctcgtcgccttcctgaccgacggcaacgccatggcgctcgttccgattgttgctgcgcccttcatcttcatgatcagccagttcttcatggtgcgccgcttcctcttggcagccgtcggaccctctagtgacgttgctaaatctggtcctccagtctcaaatcgtcagcatcgtcttccagctcgtcggcccggtcgcccagatgcagcgcaacaccaagtactactctggcgtccggcccgagcggatgacgggcccgctccctcacatcgtgagtctctgtcgcccgcaagggacggcttcctggcgcccttcgccctctccgaatcctccgccctcccttctcccctccacgcgcgctcagaccttctcgagcttcttgcagccctgggcgagccgagcaggaaaggcggcgggctcgagaatgtcggaagactcgggccgggggtgtgggttgagtgggcggatgttggacgggcaatggcgactatgacggcaaagggaggagggatcgcctccccttcacccaccgccgccgccgccgctgccgctggcaactcctccagcccaacatccggttcactcaaccccccttcattgccaccatcctcaccatcgcctctgcagcccacagagaagcgcgggctctacgtcgagttcgaagtccgcggggccggctgctgggagcgctcttcgctcgaaggcgagcgctggaagagtgcgacattgttcctctcctgaggagccgacgacgatccggcgctctctcaccttctcatctttgcgatcggtcgcctagcgctctgcctccggatatgccgcttcccctgccacctcttcggatgcccgcacgcgctgaacgaatcaccggcgcttcttcttgccttgccgctttgagaagagcagtagcaagaggggcatcgcagagactcgcgttctcggccagcgaagaagcgctaagggggcgggacgaaaggaagggaggaaggaggaacggtcggagtggaggagagggaggagagggttgaagcttaaggagggcgatcctggttgtccggtcattcggttgaggaagtcgagcgaaggagcaagaaggacgaagcgagggggctgatgggggcgatggaggctatgtactggtgggaggaggaaaaggaaaagtgaagacttcttaccaaagcgagtgcaggggagtcgttatcttcggctgcggccgcttcaggcgtacggctcgatgccgccctggaccgagcccttggtcgggttcttaatggcgcaagagcgccgagcggacggggtgagcgagggagggcgagcgctcgaggtcagcgcgaggatagaaaatggaactaggacgagacgggacacacctgctcggggatagaattcacctgccgcttcttttcgccagcggggcggctgacgtcgtccttcagcgcaagggtttattgacgtcagctctcgcgtcacttgctctccgcaagagcgagagaccgggtgagacgacccctgcctcacgcaccatcatgcgccggcgagtggcaaaaggaatgataccgcctgcggcactacctttggtcgggagctatggcgctcacaggaaggagtcagtttggcgttgaatcagccgacactgcatacggcgaaggggacgggttgggagggcaggcggacctgagcgggaatctcgtttgtctggcgcttgatcgcccggttggcctgaggaaggaacgagcgggaggacgtcagtggcggccggcagggtaacgagggatatgtcagacctgcgcgtgccctccatacatttggcgctcgacgaccggcgaggtcacgtcccgagtctgccccaaattatatgggcgggtggtggtcagcaagagcttcgccacctctgtcggctgacgcggcgcggtgggacgaaccgcgaagcccgacgtctggcgcttcgctccagccgagcgggcatgagggcccgcggtgacgggcgagcggcggtcgacctacgaataaacggcgcgggaggaaggggggcgtcagcggtcggttggtcggccgggagcaggacggcgcttaaagggcgagcggggggcgaacaggagaaatggtgatgtcgtctgagacaggcgaagctgtgaccgcgcttgggaaggcgaggagagcgagcaggccagctgcgaggaaggcaaggaggcggacgatggtgggcatgctgcggggtgctcggtgctcgagatgggcgagtcggcttgttcgcgtaaaggaaagggacgtcggccggcaagcgtctcggagggtcttggtggtcgagagggagcgagcgacgggcgaaacgacgcgagctttctatctcgggtagtcagctcagggggtcggtggcgggtcaacgcgtgcggcgcggcgcgaagacaggcacgtcgcttagacgttgcgcagcggcgcaaggacgtcaggcaccgcgcccctcgtctcacgtcttcgggaattagtcttgaagacgcatctatgcaggcggatcggtgtgtagtctaggctgcgctgccctcagtagggaaagcgacgctcctcagctccttcttgttgacctgaaagaagaggggaggcggagggtgtcagggcgccgaccccgagtaaggcatcgcgagacgagagggctcaccttgcccatcgcattccttgggatctcgtcgtcatagatgcgcatcttctgcggcagcttgtacgcggcgagctgcaagcacgggcactcgattcagcgcccttcataaaccaagcgagcagcaaccgaagggcggacgcacatggctcctcaggatttcccgtagctccttgacgttcatgagcgtcttgccctcgtgcaggacgaggacaacaccgacagcctcgccccacttcttgtccgggacgccgacgacggcgcagtccttgacgaggccctcgtcgagcgagaggagcgtccgctcaatctcaagcgccgaaatcttctcgccgccagactttgagagcaaatagagagtcagctgaggagacctagatgcagagaagcagagggtcgcaccttgatgatatcgacgctgttgcggccaagcacacggaatccgccctcctcatccgtgtcccttagcccaatgtcgcccgtcttgaaccatctcctgccctgctcatccacacagtgctccttctcagtgacggcctcgtcctcccagtagcccgtgaagacgtttggccctcggacttgaatctcgcccggctcgccgagctgcgacgtgacgtctttgtcagactcggcgagcaggcggacctcgacgccgggcatcgggtgaccgacatggccctgcgaagtggacgggctatcagctagcgaagggtgtaagtgaatgtaagtgatgatgagacgaacgtcgacccgcgtcttttcgtcgaggccacatgagaggatcatgcctgtctcggtcatgccgtctgtttgtcgatgagcgccagcatcagccacacatattcagcaaggttgagaggaagagtatcagaccgacatcgttcaaggagaaccccaccgccgaccttcttccaggcctctttgagcgtcgtcggcagcggagctggcacgacgtcacccagtgaaatttttcggtcagcaacgacccaattgaaagcgagcctaggacgcgacgcacctgacccagagaccatgagcctgaaccgaccgcacgcctcgtgcgcgctcgcctgcttcgccgcgtcaaacgtcgcgtaggcgtcgagcaggcgcgagtagatggttgggacggccatgaagagcgagagctgaggcctggaccgatcgatccagcgctcccagatctggcgaaacagaagagggaacgcggggtcaggttgctttggatgtagagggcgtcgaggtcaagttcggcacgcacaccagccgcgtcgaagaccggcatgaactcgacggtcgcgccgttccagagggccgtcaagaggacgttgacggtcccgtggatgtggtgtgaggggagggggttgagaatccggtcgtcggcagtccaggcccagacggaggacatcgaggcgacctggctgaagtcggcaagataggaggggtgcgtcatcagcttgccgcactgctgcgcgatttcaccggaatagctcgggccacctctcgccggctttgcagaggaaaaaggaagggaggacgaacgaggcgagcgcggaatgccgcatcggcacgccctttgggttcccggtcgagccgctcgtaaagagcatgaaggctggccgctcggcgtcgaatggctcggtgctgatcggagggagcggcgcatcgactggggtggcgagctcgagcgcgagcttgatggttgaggcgctgtgttcgccgtcggtcacaatatgggccaaggagaggaggtggcgtgtcagctaggaggctctgaacagctcaggaagctggaggaaagcagggctctcggacagaccccgtctcggcagcgagctcggcccccttgtcggcaagcgagctgcagacgatcagccgcttcgcaccgctcttgcggacgacgtaggccatctcttttaccggaaggctatggagaagagggacaaagagcccgccagaggcctgccaagcgaagggaaaggtcaaacggggctgaaggacgataggaggcgatggaggacgatgacgcacccagacggaccactgagctacgacccagctgaatccattcggcacgagggcagcgatgcagtcgccctcaatatccctgggcgagtaggcttgggtcagctatcgaagagtcgggccttcaacaggcgtcgaacgcaccggccgtctggagcaaggacctcgcggaatcgcgcgacgtcgcggaggaggtcgccgtacgtcttgctctggccggttcggccgtcgaggacggcaagcttggctggctcgcgttcggccgtcgcacgagcgcggatgaggaagtcaatggcagggagggcgggcaacatggtaggttgaagaggggtcgggctgacgtcgtcgtcgtctcggagcgaagtcggcaggaatcggctccgaagcgtccccttttccctcgacgcaagcggcggccgggctgaaacctccagcctgccctcttcactctctcctctcgacgtccattcactctttctcactctctctctcgcccgcgctgcccccatcttcaggagctggtctcctgtcgcatctcaccaacacttgttcttctctctcgccctccgcctcagcgcacctctcggaacccatccctccctccctccacctcgcatcagccaacatcgacgatgctcgccctcagccgccgcctcccactcatcgccttcctcctgctcggcctctcgctcatcgccagcaccgcctccgcctcgtctcactcggcgctcgccaaccaagcccggcacaaggccctctcacgctctcgcgcccaccttgccggcgccacagacgagctcctcctcccgagggcgttcgacagctcggctgtcccaatgccggtcgagcggcgcggtccgtttgcgaagcggcgcgtggtccggcgggcctgctctgccgctagctcgtcgctctctcctctcgctccgagcggcgctggcccctcattggccatcagctcctcgtctgcttcgacctcctcggccagcgtcagcgcctccgttccctctgcgtcggcctcggtctcagtcggccagggagacgacggcatttccaccgtcgaagtgacggtgacctcaacccgccagacgaccatctacgcctcgccctcggccaccgcagccgctgcgtcgagctcgacggccgccaccgcgaccgtctcgaccgtcgaccgggccggagctggaccgttccagggcgacgccacctggtttgcaactgtgcgtctgttgcgcgacctcccgctccagatctctttgttgatttcggaccttctgctcccgctacgtagggcctcggcgcctgcggctgggtcaacacgcgcgaagacaacatcgtcgctgtctcgtcgctcctcttcgattcatggccgtgcgttccttccttacctcccgttgcatggtttctcctgacacgctcgccttttgatacacaggggctacagcggcggaaaccccaacaacaaccccatctgcaacaagcgtatccgcgtctcgctcccttcatctggcacctcaatcgaggttactgtccgtccatctctttccgcgcttcatcaaatccccttcctcctcacgtactgacgcccggcctccctctgctctgctgccaggtcgccgaccgctgtgtcggctgctctgagagagacctcgacctaaccgagctcgcgtttgagcgcctcgttcctgggggagtggacgtcggccgggtcggcatgacctgggcctggatctgagtactcgccgtcgctggtcgaccgcgagccgcacgaaagagcagagagaaatgccatcgacttcagagccggtctctgatctcatcggcgactcaaaatggatgagtggacgttctcatcgagtactccgacacgcgtgctcgcgggcggaagacgagcgtccagttgccctttggcatcggcttgcgctcgacgagtttaaagccgaagcgctcggcctcgggagcaatgaagcgcgtgatgtcgcgcaggccgagctggggcgagcgggcccggatgtggtcgtcgaactgcccaagggagtggtgtggacgtcagcaagagggacgatgaagatctcgaccttgcacgagagacgcaccgccttgtcagcatccgatgcgtgcttgccgtcagagataaaggggccgtagatggagatccagccggtcgaaacgttcagcagcggcgcgaggtgctcgaagacggccgtcgtcacgccctccggcgcgatatgaaggatgttttgcatgacgacgccgtcgaaggtcggccgtttgccatcatcggcgaaatgcgagcggacgctggcccagtcggtcggcgagagggcgttgaggacgatccctgggaggacgtttgtgacgccggcggaggcttgcgagagccgggcgacgaggtgcgggtcgcactctgtcggctggaagtcgatctcggggttcgagacggcgaggtgctgtcagagggcgacaggaacgaatgtgggtcagcgaaagatgctcgaaagcagcgtggcccagaaaaggcctacttgaatgtgctcgccaagaccactagcgatctcgaggattcgagcacaagagccagggccggcggctgctttcgcctcatcaagcagcggttggaccgcttcgagcaagggcccctttgtgcgctctgctgagcctgggtacgtgagggcggcaggtcggcttccggtcagccctcgtcgagcatgcgtcggctgcggacgagcatctcgccaggcagcagagccttcgcagcatccccgccgcctctcacttctacagcatgcaccggccaacagcgagaacgacccagaggcacgcaccttcgctgctccagcagatcgggtagtcgtcgccgtcgtctgtgcctcgcaggcgctggaggggttcaggcaggcccggcagcgagctaggctcgcgcgggacgatgggcgcgctgctagacattaggctggagggtcgtcgagctgctagtgggctgagcgggggggcagagagcagcgggctcgagaggagatgatgaaggtcgggcgtcgaaacgaccggaggccataggtcagcccggtcagtttcggcgtgccagcgtccgcaccgaccgacgacctcgacgaggttgatccgcctgcgagcaacagcagcggtgacgccggcctgcccactcgctctttgacccaggactcgtcctgctgacctcttgtgtacggtgctcccaaggcggccggttcggcgtttgatcggccggtcggctcctcgaagccgtcggccgagacgacgccgaacatgccgaccgcccggacgagaccgacgacactacaaggctcgccaacgcctccaatgaggacgggccctgatccccttgctccgtacccctcatctacgtcttcctgcgcttgtcatctcttcatgccggcccgccgtccgctagacgatgcgccttcagcagcaacgactgtcgtctctcccccgccgacgcccaagctctcgcacgaccacctgccgacgacaggaggagcgccgccatcccttctactcaacgccgacccggcaggagcagccgatgcgccactcgagccaaaggctacagagccagagctctcggaccagaccaacctgctgcccctccggcaggttgcggtcgtcttcatgggcctggtgagccctgcccctctgcgccgcggcgaactctttaccgcctccactacgccagccacgtcgtgagctgactcgttcgcacccctccatctgcagtctgtcgccctctttgttagtctgatggctcaaacgatgggtacgtagcggcaggattcactgtgcagactctccggtcgacgcacccgctcactgcgctgactctcgtccactcgatgcgcagtatcaactgctctaccgacgatcggcgccgagttcggcctcagccgacagtcaggctgggtcgctacggcctacctgtcagctcagcgtctcactgccaaaccacaggtcagaagctgacgatggcctgcgtttagcttgacgtcgacagccttccagccgctttacggccgcttctccgacatttttggccggtgcgtcctctcggtctggatcgtggactagcttcgttttgctgacaacatccgccggcgctcgtcttgaaccaggaaggtgatcctggtggtctctctgctcctcctttccggctcatcgaagactgaccgacgttctgtcgtccgagcagtatactctgatatttgccctctctatcttcatggtcggcaacctcggcgccgcgctctcacggactatgatacagctcatctgtctacaagccgtcgccggtatggtgcgtctgtagacgcgtgctgagagccctgtccctcgatctgacacctccccctttgtctgggattgcagggcggaggagccatcatcacgctttgcatggtcatcatcagcgacgtcgttagtctcaagcagcgcggcaagtttcaaggaatcaccggaacggttgtcgtcctcagcaactcgctcggccctcttgttggtgaggccgccccttcccagcctccgcaccatcgttgccccctgctgacgaccgagagctcggtcaaattcaggcggcgtctttactcaaaagtatagctggcgctggatcttctggatctgcctggtcggtctcaaccccgtgtccgcctgctctggtagacaagtcgactcacgccaactctgcctttccggcagccgcttggcgcgctcagcatcgttgtcgtcattttcgtcttgcctctgcggcgcgtcaccggctcctggaaggataaggctaaaaagatcgactatgttggctcgttcctcatcctcgctggcagcatatcgctcctgatccccatttcctggtgggtgctgcgtgacctcctcaattcggtcgagaggggggctgaccctttctccttcgctcgctgcaggggcgggactgagtacgcctgggattcagtcgcagtcgttctggtccgtcctgttgtatccagcttgcgttggctgcgctgacagtgagctcgctttctgcagccgctcgtcctcggcttcggtatctttggcctcttcgtctgggtcgagacgaaggtcgctctacgtaaggcgccttctaccctccttgtagactgacatgcagagctgacaaccgaccgtcctcttcgcagccattgtccctctatcgatcttcaagaatatcaccgcgaccggcgtcattctctcgacgttcctctcaggcttcatctgtgcgtcgctcggcgcctgagcgaggatgaagcttcctcagctgacctcagtccggtctcagtctatacgcaactttacttcctcccccaattctttcaaatcgttttgggcgtctcaaccatccggtcgggcgtcctcctcttcggcctcattatccctcagaccgtcttctccttcttctcgtgagcgtctctcttcatcccttttcagcggcagatcccacatctgattgttcccccctctccctcctccttttcgcagcggcttctgcgtcagcttcacgggcgagtatcgcatcaacctgatggtcggctttgccctctggacgatcggtgtcggcctcctcagcacgctcaccgccacctcgggcctcggcaagatcatcggctaccagctgctcgccggcgccggtgcgggccagacgttccagacgggcctcgtcgcgcttcaggcgtcggtgccgcgctcgcagatggcggtcgtcacggctctgcgcaagtcagtgttccccctcgcgggcaagaagcgccaatcagcatccccaggctgactctccctcaattctcagctttgtccgcttgctaggcgggacggtcgccctcgctgtcgctcaggcactcctcaacaacgccgtgcagtcagtctctccggttggtcaccgcgtagaccgaccctcgctaacgctgctgctttcagaaacacgctctccgcctctggcgtcttcactcaggcccagattgacacgattgcctctgcgcccgctcggatccatgacggcgtgacactgacggcggccgagcggcttctcgtcgtcgaagcatacacgctcggcattcaccacgtctggtacatggcgatcccttgcgccgggctgtcgttcttcctcgccgtcttttgcatcaaagctcgtgcgtcctgatcctctcagccctctcagtagcgaggactgacgttgaagccgtccttttcgcgcccagacgaccttaatcgggccgacgacgccgcgcagaaggaggccgccaaagaatgggccgcccggcacaagctctccaagaacgagcggcacgcgctcgatctcgagaagggcggctcgggcaccgagacgccgttggcggtccttcctgacttgacgaagggcgagcgacggtcgtttgagcgggcggtcgagcacggccggcaggaggatctcgcacgcgccgtcgaggacgagctcgttaatggtgctcatcggaggaaggacgagcgctccgactagaccctgctgtcacccacctgtatcgctatagatgtgtcactaaaggatctcggcgacactgaacaatcaaggcggcccttctcaacgcgccctgctgttctgcatgtagcctctcagccgcatcgcttccgccagcccgcccgcgcagaaggaaaaactcggtagccgccgccgcctcgacccccaagcaccgccatcttcaattcgtgcgtcctgactataagccggcccttgccgtccagctgctcgtgtcgactctaacgtgccctgcctcctcaccagctttgccaacaatgtcgaactctgagctctcctacatcatgatcagtacgtcgctccccttgcggagggatggacgcgaccggccccctccgcccctctctcctccttttgagaggtcgagaggccaagagctcgcaggaactgaccgcggccgcctctgtctttgaacctgctctgtagagcccgacggtgtccagcgcggactcgtcggcgagatcattgcccgcttcgagaagcgtggctacaagctcgtgcgtcccgccctgaccctctggtttgctttgattgatcgttgggtcgaccgacgcatcggtcgctcctcggcaaacatgactccactcgcacacgagctgaccgcctctctttgtcgcctgcaggtcgccctcaagctcgcctcgcccaccgaggagcacctcggcaagcactacgccgacctcgccgagaagcccttcttccccaagctcgtcaagtggatggcatcggccggccccgtcgtctgcatggtctggcagggcaaggacattgtcaagacgggccgcgtcatgctcggcgcgaccaacccgctcgcctcggtccccggaacgattcgcggtgactacgccgttgacatgggccgcaacgtctgccacggctccgactcggtcgagaacgccctcaaggagattgctctctggttccccgagggcctcgcccagtacacgctccagtcggaggccaacgtctacgagtaatctcgccaccttgcggattcgtttggttcatcggtcgcacgctctgattatggcgttttgacggatcacagggcacgcagagggtctgaggacgggatgaggtcggcaagggtgagctgaggatggcagaaggtctgaatggcagaaggggaaagcaagtccttgggccgggtgcaccgccggacgctgcccccgggcgaacaagagcggagaccgctgccgcaactacgtagcatggtcacaaggaagcaaagaccaccctgactaagtctcttgaggcagatgctagctggggcagacaagcgaaccgcgaccaaaagacagaggcatcacagacggacccccttccctctccgtcaacccgtcctcgcccgtccgagggaagcccgggactgctgacttgactgccgtcgtcgccgtcaagtttagtcctaacgggggaaatgaaggaaaagcgtcagcgagcgcagagaattcaaaaggaaagacgagaagacgacgcgaacccaaagcttgcacgtcccgtcccacgaggccgtgatcatctttgagctctcatgcggcagccaaacatgctgaatgacaacctccttgtgcgcatgcagcctcttcagcagcttgccgttcttccagtcccagaagacgacggtgccgtcggccgtcccggacgagatgtacttgccgtcgggcgagaagccgatgccgcaggcgtagccggccgtcgtgtgccctgcgaaacgcttcttgcctgttcgcgatcaaagacggagaggaggggtcagcggttgtcggaggtgaggggaagggtggcggggatggagacggacggttctgccggaagccgtcggtcgaccagatgaggatctggttgtcgagcgactggccggcaaaccatttcgctgccgggcgaaagggagaggggaggagggggaagtcagctttctggcaggctcaggagaaatcagcgccagactgacagctcggatggagcgtgacggccgggagcgagtgcatgtcgggctcggcaatgtacttgatgttgaccgggacgtcgtagtcccaggcgcggattgacttgtcgtccgaggtcgtgacgaagcgccggttgtcgtcgacaaacgtgattgtgttgaccggaccgaggtgcatgtcgtattcctgggtgatctggccagagttggtgtcgaactaggcaaggcaaaagggggggggggggaaggtcagagccgaggttggagagcgacaaagtgggcagccgggcaacggacctggacgatctttttgtcctgcatgcccgcgagaaagacgtgctgcttgtcctcgtccggatggaacgcaacgacatgcggcctcttgcccgtcgtaaatgccttcaagcacgcgcccgtctcggtatcccagagcttcatttgccggtcgtagctcgccgtcaagaacctcgagccgtccttgttgaatgcaacgtccttgacggcctggccgtggcctgcaaacgtcctcaggcagttgccctcgttgtaaacgtcccagagcttgactttggtgtccatcgagcccgtcaggagaaggtggcccgagcctgggaagagcttcatcgacgagacgccctttgtgtgaccggcaaaggtgtggatgcacgccttgggcaggaatgagtcgggcgcgggcgcgtcggacgagagcgagacgcccttgtccgtcggaacgtgcatgtaggtccggccggcgtagtcggtcaggctcttgcctgcgcgccatccgcggttggggaacgttcagcactcgtgcgcgactggacgccagatgtgtaagggaaggggtaacgcaccgtggaagattgacttctcctcgccggccgtcttcctccgctccctcgccttctcgacctcctcctcccggcgcttcttctctacccgccacccctctccatccgcctccgtctcttcctcatcttcccctcccacaggctcctcatacccacacccgcccgtccgccagtcggccgcccggtccacgtcgtccaaaccgacaacccatcgaccgagcagctcgtcgagacgcagcagcggtacattgacgagctcctgcgcatctgggagacgtacaaggtgagcgagcggcgggcggcgagcggcggcggaggcggaggcccttgttttcggcgtgcgttgcttgcggtggtcctgactcggctgcctgtctctgttgcgcacggcaggacgtctacgccaggaatcggacgcgcgagctgacgctcgtcgactgagacccttttgcgcgccgacgcactccctccttgctatcgaacgcgacctttcactttttaccagacgccggcgggatccgaaagagagtcattttgttttaacagaaggggggcgtcggctctagtaccactttgctcgcagcttgcgctttgcgacgatcggctgccgcgagaagaggtgaaggggaaaccagatcagcacgtcctcgacccagtgaccgtccgtgacgggagcccgcaacgcaacgcacccttgtgacgacgatgccggccgtcaggcccatgatcgtcaggacgagctggagcttgttgaaggagtctggcaggacgtcgaacccgcccgagggcatcacccgcgtctggaagaggtcgagcccggaggcgaggacgatcgaggtcgactcgaggagggcgggcgtcgagcggagggaggcgatgccgaggaccttttgcagccgcacgcacgcacgcagcaagcacaggcgcggacaagggcatcgtcagcctggcagggtctcgggggaaggatacagacggggtcgagggctgacctcattccggtgcgagacgacccgctttgggtcctgcggcatgtacggctcgtaagggacgagcatctccagcttgtcagcggccgacggaggtccgagcggacggcgcgggtcgagcccgcgccgggggatcgtcacgatctggttggcatcgttggcgactaagaggtgcgaagatgagggacgaggatggtcagctctggcctttgaaggcgaacacaggtcggcgatgggtctgactgatgagatccttggcggtgataccgtgccgagtctcagtcacgccgagcgagcggacgccatgggcgagcaggtaggtgcgggagaacgtgcggatcgcgtggtcggccgaggcggtcgacagctcggggctgcagggagaaaagtcaagtcagctcaggtcacttcggattgacgctcgaagctagagaacaaccgacctcctgagcttgctctgtccggcgtcagactcgtacatctcgaggctcacaaggtgctgcgcgcccgcgaggtctccaacgcgcgaccggaaggcatagacgagccagttttcgacgaggaggacctcgaccggcgacgcgacgtcgacgtcgctgtgcgtcgtctcgtagacaatcgagccacgcgacgtgtcgacaacgtaaacggttgccgagctggtcgccgacgagacggttgaaagcgcaatcaggtgcgggttgagatctgttcaagggtgggcatgctgtcgtcagcttgaagctagcgcctttcgtgacgccgcacagaagacgcacacttgtacatcaccgaccgatcgccagtgaccttgccaagcgaagcgacggctgatgcagcgttcggcgtcgaccggcgggatagccgctcgccatcgcggagagatagctgccacaggggctggacgggcccggcggttggctcgccaccaaagccctcgagcttgaacgcgccatgcagggtcgaggcaacggtcacttgaccggctcgatccttgtccgacgctgctctgggccagaagacggtctgtaaagggacgcgtgttggtgagcgtttcggtcgacacatctggacgtaagcagcgctgacactcacctccccagccttgctcatgacgcgcaaagtcttggtaccttcgccctcggcgctctcgacgaggaaggcgccgacaggagcaccggagaagaggaccgaggcatcgacgagcggcagaccagtcagcgcgtcgagctcgacggcggccgtgcgtattttctacgaggagggggcagcatgtcagatgcggccaatctgagacggatgggcgacgtcacccacgccctcgaagacttcgttcacgagcacggcgaccgtaggcgcctggccggaagtcgccggcttgatgagccaggtgccttcgatgcggacatcctgctcgccccgaaggcggtaagtccagaggatcgagccgttaagcgagtcgaggccaaagattgcgccagcctcggtggcagcgacaatcaccttgcgcaggccaaaggcgtcgcggtggagggccccgctgtgcgtcgcgtgcggcgcgatgacatccgaggtcgaggagaagaactggccgacgaagcggagaaggtagtcgggcgtgtgctgaaaggagacgttgagtcgtcagcacggtcagactgacgtccggcaggaaggacagacgcaccttgagctgggcgaggtggcggatgaagaagctcgagctgctgagggcgtcgtcggcaaagacggccgcctcgggcaggtcgacaaaggtgagcgagcggatgtccgatagagcttcctcgcgcgtaaaaagcagctgcttgttcttgtagaccgcgagcgcgcccgtcggcgtgacggcgagggcgaggtggtcgccggcggccgtgattttgatgccggtgttggccgagctggtggggaggaagtagctgccggcaacgccggcttccttgccgaagacgtggacgatgtatgaagcctcgtcattcgtatggaagacctcaagggcaccaccggtgccggctggacggatgaattcctcggccatcggctacggtgaggaagccagacgaggtcagttgcggcggatcgaaacgacgccgacggatgagcactgaccatggtcttaacggcacccgtcctctggacgcgaccgtcggcgatgtgaaggatatcgaatcgctcgatctcctcgcctgcaggagcggtcaaggtgtcagaaggctgcgcagattcgccggcatgacgctccgtctagactcaccggcctcgccagtccagacgccgacaaagacaccttccttgtcgaggccaaccgacatgagctcttggtacgagcggccgtcaagctcttgcttggcgctcggcacgtccccagtcaagtccttgagccagatctcgccagtctcccgctcgagccagacgacgccagtcgagctggtaatgagctcgcacgatgggtcagattccccagacgataggacggtcgccgacgtagcggagagcgagggcgacgcagcgtcgagcgcatgaagcacgagcgcatcgaacgcaacgccgacgtggcggccgagaacaacgacgcccgacggcgtctggatgagtttctggaatgacctgaggaagtgatcggccgtggtcagggtcgagcagccttcaaaggagttagaaatgagatgctcacaggacgggagcctcgctgttggtccagacttggctcgagacgccgtcggcgagcttgaggcgggcgacggtctcgccgccgccgatgagcaggtagacgacggcctcaccggactcggtcgtaaagagcgcgtcggccgtcttgaactggagctcgtcatcctgcgatgcgagaggcagggtcgtctcccacagaacagcgccgctcaaagagtcgaggtgccgagcgatggtacccctggtcgtcgacgtgacgaggacgaccgctgaaagggaagagcagggcacggttaggatcctgcaatcggaagaccaggccgagcagaggcgcaccattctcgtgggtgaaatagctatggacgagctcgctcaggggaaactggtgccgccactctgcgggtcaaggacacaaggtgaagctcatcagccgacgagctcctggctcccggcgagggaagagagcctggaagggcagacaaacctatgctaccgtcctctgtgcttaggctcgccgcgacattgctccgcgtcagcgtgacgatgctcgtccgctcggcgccatcgggcagcttgaacgtctcgaacgacgggccgcttcggagggcaggatgagcgggcaagggcgtgccgatgtgggccttgtgccagtcaaggacgcccgcgaggttctcctgaacggcaagcgcgccgagggcgacctgagagagaagcgcaagcgctcgagggaacagcatccgggtcgagacttgaggagaaagagatgagcgtcggcggaggcgaccaagggccgagccatctcgcaaggtcgcgccgcgagcggcggccgtctgtctgccttgctcctccctcgcgccacgacgaaatctactgcctgccgcgcgggcgccgcacctcgaaacggttcatcacagacgtgccgtcagacggcaaagcagatcggccctgcctcacgtttagcagacgggaaaccgaatcatgtcggctgatgctgcttgaggatgcggcggatcgccagaccgacctcgccctcgtcacaccagccgaccctgactgcggttccaccaggcccagcggccagcaacgacgtcgatcgccgcagaacaccaaccgaccggcgcgtcgcgtccgaccagacgtcgcgctcgggcgggatgaggccgaggagatagaccgaggtgaggtgaccgcggacgtccgacagggagccgttgaggaccaagacgatcgacgggaggacgctcaacgggaagaggttgatgccgacgtcgccgaaggcgagatcgagtccgccgaatgccggctcggacagcagcggcgcttccgagtgatgcagctcgatgccggcattgagcgccgagcgccatgctatgagggtgccctagagtcaaccagcccatcgaaagactcgctctgaggcacgacatcaggcagaggctcacccttgcgcttgttgagcagactcaagccgatgaaggcatgaagcgtgtcccgcagcaggccgccctcctcgccgccgagccggtgcaggagcggcaggttctcgggcatggcgacggtcaccgatgaagcggcatcgactgaagcaagcgggtcgccttgggcgacggcctttacattggctaacggcgggatggatttgcgcgcgagttggtggccggggcgacgtgtgcgtatgaaggcagcgagggccgaggttggcgcgacaaatgtgaagcgatcggcttcgggcgacggtgccgttggagtctcgtcctcgagcaagtctaggtcgagctcctcgtcgtccatgccgacctctccgtcagccagaacgtacggcacatcgacactactggcaatggaggtcggatcctccttgagcaggtcgtccgcaaggactggcgacggtgtatcgtcgaaaatccgcagcaggtcctcgtgcgccgccgtttgatcgtcatccgagccgtcgcccaggtcctgcaggaaccgtcgcttgggctgccggccggcctccaagggccagagctcgtcgaccgagacggcgtcgcctcgcctcctcaggtcgagctcgcatctcgtgcggatgaagtcgacgtcggcgtccggcaacgttgacatgcttggaccagcctcgtcgggagggctggacagccctgtgtctcgcatagtgccctcgaggtctgcgacgagagccgtcgaggtcgcatcgacgaccgtcgtgcagaggtcggcgtacatgtccgactgcgagggcatttcggagaaggggcgccagtcgagctgtcgaaacgagccgaaagcgtcagacgccgcgaaaggtcacggctgtcggccaagacgcacctcgagaccgagcgacagcatgccgatgcctttgctgcgccgggcgagcggcccagcggcgagttgctcgaaattcgaagggagcagcgtagaaagcaaactgctgtcggtcgcagccggcatcggaggaactttggtagcgaaaggtcagccgaaaggccgtcgacgagcgagcggttgagggacggaccagggaaatcgacgtcctcgggcttaacgagagggccctcgacatgtccctttgccatttcgagcagagctgtcccggtcgagccgagcacgccgaggagctcgcggccaatgtcgtcagggccgtgctcgctggctcgaccgccaaccatgtcgatcgggcggacgctctccgaaagcgagttgagaagcaccgatggctccagtgcagccagcgcgccctggctgggcgcaaagcgggctcgccggggcaagatgacgttgaagtcgtccgattgaggaggttgcggcgagggcgagccgccgtctgaccataagccgccgtcgctggaggtggaaggggtggacgggagcgagaaggtgacgtcggagggcagcgtgaaacgcccttctgcaaaaggtcgtcaggttggtggtaagctgagaggccggtcgccgcccggtcgccgccatgccaaagacgagctgcactcacgcatcgcgtcgaggacctcggtaggcgcaggccctgaatcaagatcgtctgacgacctgcctgccgtccctctagagtcgatgatcgacttgccgatcgtcacaagtgaaccgggcaggatctgccgctccggagcggcttgctgctcggcctggcgacgcgacacgtagtagaccgagtcccaccgccgaggaaagattggtggcgacctaaactcctcgaggccctgcgccaaggagaatctcttgagcgacggtcggtcggaacggcgagcgaaactgactgacctcctcctgccggctctggtcgccgctccccgcccaagctggatcgagcgcaagcgcgaggagctccttccgtccactggctgcctcgaggatcgggttggaaatgcccccctttggcttaggttgaggtacggccgacaagaggctgccgatctgggcgagctcggccttggtgatcgcaggcttgagccggctgcaaaggtcacggcagcgacgttagctgcccgggccgtttttttcttacacaagacagacgacgaacgcacagcgcatcctgcacattgacatcgtcaccgagttcctcggctgtgggaacgaccggctctgccaccttgacgagaggcctgagcaggtcaggagtggcgcgcggaatgaggccgatcgtgaagtcgtcttgcccgaagcgaggtgtcccgcgtagagcctttttggtgaggaccggcgagtctgggggcgaggtgggcgtctgcgggggctctgagaggttggaggaggcgacctctgtgtcaggtgcttctcgggatggtccgcccagagcgcatacacccactctgccgggcgacgaccgtctctagccgtccctctgcggtatcgagcgcgtgcttgagccgacgaaagacgtcgagggtggcctgctccatcatcggccagcgaccaatgatgagcatgtcggcatcgcctgagccgaggacgagccggtgtgcgagttcgtcgaacagcggccgcagaagctccagctcggcctgagtaccgtcatcgggggacgagtcgagcggcttctcagccgaggcgacgggcgacagaagccggccgagatgctgtgtgttgaggagctcgtcagcgaacgaatggcgacgtttccggctggacgcacgcgggcggccgcgtcacggatgaaccagtctgccgtcgtcggaaagtgctgctggccataggcgacgatctgaggcgggagcatcgtcttgaacgggaggcagcgaggtaggtggccagatgtagtaggggctgagcagggccatcgtcagcggcagcaagaagcgaaaggaaacgccggccgcctccgcgcagcacgcctccagcgccgggcaaagcttcgagtcggaatagggtcatgtatgtcattgtcggtcagccgtcgtcaattccgctttaatctgttggagggaggagaagcaagcgactgtcagctccggtccgcagcaacgcgagaagcccgcaaggacgcacacagcagccgggtgaggatgttggccttggtcttctggatggcctcgtagatggcctggacctcctgcttagagacgtcggcaatgtcggccatcaggtaggccgtgtcgccctttgagtccgagtactgctttgagatgttgtggtcggcaaagatctggcggcggcggcgagagaggagatcagctgacctgcgtagcgagggcgagcagcacagaaaagacgcacctcgttgatggcgcggagcgttccgggctcgttgcggtggacgtagcagacacggatgtgcttgtcgtcctcggcggtgatggcccggaggtcgacctcggggaagttgacggcgccgatcgaggagccatagttgaggtagcgcgtgagcgcgcccgagacctcggcgccgatcatccgctgggcctcctcggtcgaaccgccaatgtggggcgtcaggatcgtgttgggcgcccgctggatccgcgacgagaaggtcgggttgaggttgtcgttgaaggtcgggccgttcgctccgggctccttcgggaagacgtcgacggccgcgcctgcgagcttgcccgactcgagcgcggccgccagcgcctcgaggtcgacgacggtgccgcgggcattgttgatcaggtaggcgccgtccttcatctgggcaatctcctcggccttgatcatgttcttggtctcctcgagctcgggcacgtggagcgtgacaaagtcggcctggccgaggaactcgtgaaagttctcaatctgctgggccgagccgagcggcatgattggcatgacgtcgtagtagatgacctgcatgccaaaggcctcggcgaggacagagagctgggtgccaatgtggccgtagccgacgatgccgagcgtcttgccgcggacctcccagcagcccttcgagaccttgttccagacgccctcgcgcatctcgcgcgcccggtccgtcagctggcgcgagaggcagacaacctcggccatgacgagctcggcgaccgagcgtgagttggagaagggcgagttgaagacagcgataccggccgaggcggccgccttgaggtcgacctggttggtaccgatgcagaagcagccgacggtgaggagctgggcgcgcgagcgggggggagggcatcgggcggtaaagtcagggctcagcgagggcgcagcagcaatcttcagccgcgacgcaccttggtcgccgccttgacgaccttctcggtgagctttgtcttggaccggataccgatcgcgtggaactcgccgatccgcttcaggagctcctcctcgctccaggccttgagatggtgctcgacctggtagccctgggccttgaagtagtcgacggcgccggccgaaatgttctcgagcaggaggatcttgatctcttttgagccgagcagctgcagctgccgcggctgccgcgagctcggtgggttcgacgtaagattggagggcgaggtcgagagcgtgtgcagctgggcgatgggcgaggtgccgaagttgcgaggcgagccgacgggcgacgtcaggccctgctgggtgtacgagcccgaaagcgggattggtatgctgcgagtagcaaagcaggtaacgtcagaaatctgcttcgggaagagcaggcgaccggacgaaggggctggtcgatgaaagtggtctaggcggcagttggccgggcaggccgctcgacatgagccaaagtcggcggcagcgccggcgccaagccgagccccttctcgcctcgacgaagatcaaagctggccacatcagagcatgcgctcgtgcgtcgccgacgcatgccagctgcaacatgccagcgacgagctgcagcgagcgtcttctgtgcatcccggcctgcagggacagccctccgtcgggcggcgcggccgaaagacgacgacgtcagaggctaggaaaggaggcgatgctcacctgtgcgggacgtccgagatggagaccgacgtcctccgctcgttcttgatctggatcggctgcgacatgacttcctaggcgaggggcaggggctgttttgctttgtgaagaagagtaaatggctgttgggaggggggaggggaggctgaagctccctctcccttgactagcaggctggcgccgaaaacgacgatggcgtcttgcgcgcggtcgaacctccgaccgtcacgatgctcgatttccgaataagctgatcgctgactcgaccttggctgctctatcggaatgcgacaggcctctgagattggatgctgacagagcgagttttccggaagaataaactaagagtgtcatgggttcgtcaaagggtgatcgtggtagcgtcaagtgaaagggagttcgccgtgctgacagggatcgaggagggtgcagtgatgtcgagcaagattcataggcggttgaggcagaaggccgcttaggagcgcggtcgagagacgcgttttggcagcccaagtgagggtgattcgaccggcgacaaaacgtctgcccgccccgggggtggtggaggagacgacgcctttcgccggaggcgctgaacaagccagacggtttgaagggcgggtcagtcaaaatatctgaagcgggattcttgacttgtccgacactcaccgagcaaagagggcaccacttgcgtcgccaggccgcgtgcttcttctcctggtgatcgactgccagacgttcctcaatctcgacccgccggtcggccgtctcccctccgactgggtcctcagccaacagctgatcgttgctgtcgccatctgagagcgaggcggccgactcctgatcctcgctcaggtagaacgagacgtgccgttgcggcttgatccgaccggcgagcgtcgccggtgcgtggaggattgagtgcaggcctgcgacgcccgagtcaaatgactgtgacgaactcgacgaggccgagtcttgccgtcttggagtccggacgaccgtcgtcgtcgtcggcggcgatggcgatgcgctccggcgccgtcgaggagggaacgctgaccgggcggtcaaaggcgaggggagcgacgctgcccgctcgcgaagcgcctgcgctgggtcgaacgggtgatcgcgcacgttgcgcatgacgcagaatgtccagggagagagcgtgacgactgcagactgccgggaggaacgacgtgcgaaggggcttggtcagccgggtgatattcgcgagctgagagacgcaaaggacgacgtacgacgagagcccctccgatgccgatggcccagacgacttgatgcgggacgtagatgctgccaacattttggcggtcgaggtcctccttgagctgtcgagcgagctcgacaggcaggaaggtcgacacgtcgtcgcccgctccagtcgcggccgggatctcccgtgttggcgagctcgaggcggacgctgcgcggcgggtgctcggcagcctcgaaggtggtgagtgcggcgagcaaggagcggacatcgtcccggaagggcgtcgagcagtaccggtcgaactgcgaggggtcgaccagctggcggaggagacgttgagggcgcaagctggagggagcgtgcgtcggatggacgggctagggctggagctcggtagaggtcggcgtcggcagcttattacaggatgcagagctgcaagttcaggcaggcaggtggcgaaatgagccatggacaggcaaagcggcgttgccttgcggaagacgtacgattgagcgaaagtcgaacgagcgagcgtaggcgcggttcgagagccggccgagcaggatagatcaagggtcaaggatggtcttcgaggtgagcatgacgggtcaggctctgtagaagtacgatgccgccctctcctctctcgccctgttgcccctcgagagacgggcttaggagaaggcggcggccgtcagaggtttgcggcgtcagcaacctccgggctcgggctcgccgaagcaagcggcccttcggccgcctggcgccgcccgccgcagccttccgacgatgcccgagacctcgacgtcgagccattcgacccggaagagcggaatgacaaacgaacacggcctgaggagtgcaacagcagagaatgatcgatcgtcaagacagcagtcacacggcgtaagagaggggggaggaggcgcaagtagtggcggcaatggccgaccaggccgcccgaaggtgcccgagggtgcccgaggcggtaacggcgaggctcggctagcaaccgggccgagccttaccagcagcgggggtgaccgcagcggccgacatgttgcggccgacgcccacgcccctcagtactcgaagaacatgagctggaaagagaaagagcatcgcgcgtcagcctgagcttgctgggtgtgcagaccggccgacggcttacggggtcggccttgtcgaagacggcgccgccttccttggttggccgagtgtcgaccgagtgcagggtgaagggcccgacaccgagttcgggcgagaagacgctggcatggccaggtgagagggtcggtgtcagcttgtagataaagtgcagcgaaggaggtgccgtcgacgtgccgaatgtgaatgcaatgaccgtcgctgtcgagctggattttggcgaggtacgtgatgccgtggggcatctggatgacggtgtaccgaagggggtggtctgatcgcaggagaacggaagggccgggtcagctggcaaatctcggggtatcgttagacggagcgcacaaaactgaatgctagcaaggagaaaaggacggagagaaagagtcaaccgtcaaacagcgtccctctggcacgaaacgagcgcaaccccgaacgtacgtgttgtcctttgggtcttcaaacaggctttggacctcgccgagcccgtgcttgacgtcgtcgcggcggagctggcgaatcttcttgagcacagcgtgacggatctcgggactagcgagcgtcttgcgggcgagctcgtcgtcggccgcacgctcagcatggactaccgaggccgaggaaggcaggacggtgtcggcgtcggcatcggcgtgctcgtgcgcgaggcgggcgacggcctgtgcgtgcggaaaggcgagccgtcaggccttgcggacgagcgagagatgggtctcaggagagcagacgaggggatacggacgtctttggccttgtcctaagcagccggagaggggaaggaagtcagctcagactgctttgaaacgctctcgcagagctggtcgagccgcacgaagatctgctggccgagggggaagcaagcgacgtcagcggtcagcgtgctgctggttttgacggccagtgccggagccacgtacagaggtcatcttaagcgggaagagcaatctcttgctttggtgaaggaggagggtatggtcgtctgggaggaaggaaggcggccggccggctcccctttgagagatgggcgagaggagggcggcgaaaggggcgcgttcttgacgggactaagcaaccgtcggcccgtccgcctggctccctttgcagcagctgtcgccgaggacctagcaacgaatatcctcgcacagtcatagcgcacgctgccctgacctgttcaggaaggtggcgagagagcgatggacaaagtgaaaaggttggcgggcctgctgcggatctgcggtcgcgtcccgagagggcatgaggtcgagcggctcaagtcgcctcgcctccgggccgacgctctgtctaccgcctcgacgacgtcggcacccgccgtcgctggaccatcggccacgccatccatatctggctcctcggcgcggctgaagcgcaagcgcaaggtcgaacggcctgccctcgacaacggcgaccaccgtccgggtgtcggccgctgcttcggcgtcctcccgcacccgccctaccctactcaacacctacccatccctcgttccctcctagcaatggccaagtcgctccgcaacaaggccaagacggccgcccggtcgcgcaagcgcgaagagggcgagtaccaggtccaccacgcggcccggctcgcgcgcctgagcgagaagctcctcaagggcaactcgaacaaggaccagattgccgagggctcgacggccgccgccgccgccgctgagggcgaggacgacgagacgatggaggttgcgaaggatggcgaggaggtcgagggaggtcagtcaagcgtgttgcactctggagcgcgtcctaggtcggccggctgacagactcccgcgacctctttcttcttcgacagccgagacgaccgagaagatctcgacgtcgggtcctcgcaactcgcggcgcgagtcgtggcgcgagggcaagggcatgaaggcccgggcgacgtcgcacggcctgaccgccaagggtgtccccaggggcaagcgcaaggcgggtcggccggcacgcagacgctaggtggccagcagaccgctgcttgaacacgcctttctgcgagtcgagggggtagcggtgttcattcctagagtgtgccgggatgagagggcggatttcgccgcctctcaaggcccgagcctgtacgcatatcgacgaccacttcacgaccgataccttgcgcagcgccctgtcgccgccgacgaatcacacgaaagaatctcagccagcgtcgaggaggctcgaggtgagcgcaagttgtacgtcgaggcagggttcgacttgttgcgcgcgcgcgcagccacgaccttgggcgcactactcggccgccgacggccgaagcggcggtaacagggctggaaggccgccgcctcgtcgtcctctgtctgcaacctcgaccttcgactttcatccaccctcactcgcacctctacacctgtaacagctcgacgctcatcagccgctcgagatgaactgtacgatctccatttgagtgacaggtctttgtcgttgtccgccgcgagctgatcccgcctgcgcctccgccgctgccgctggtcccaagtcacctctggcgagtcgcccgagtcgctcctctcgctcgacaagatccgcaagacgctcaatcggctcgaggacaccatcatcttccgtccgtccgtcgtcgctctgctgctgtgcggcttggcttgacctgggctcgctgacctcgctcgcctcccatcacctgcgcgcgccctcccgccgccagacctcatcgaacgcgcccaattcgcgcagaacggcatcatgtaccgggacggtgctttcccggagctcaaggagcgcgacttcaacggctcatggctcgactggttcctcaaggagattgagaccttccacggtgcgtcttggcgcagccggcgttcttccgggcaactcgctgacgggcttgctgcctgcgccctcggatgcccgctcctcagctaaagcccggcggtacacgtcgcccgacgagcacccgttcacaccgataggcgacttgcccgtcccagtgctcgacccgcagagcctgccgccgctgctgcacaagcacaccgtcaacgtcaacggcgcgatcaagcgccgttacctcgacgacgtcgtcccggccatcacgtctaacctcggcgtcgccgacgacggaaactatggaagcgcagcgacgcgcgacgtcgaggtccttcaggcgatcagccggcgtgtgcacttcggttggtccgctcggctgcctgccggtctaccctttcgtgcactaaacctgccgctctctcgcctcttcaggcatgttcgtcgccgagtccaagttcctctcggcgcctcatctattcattccgcatatcctcaacccgagcccggagcggctactcgcctacatcaccaagcccgaggtcgaggcggccctgctcgtccggctcggcaacaaggcccacctctacggccaggagctcgacccgatgggccatcctatcgcagatgacggcgtctcgcgcccgggcaagctcgacgcaaaggttgtcgtcaggctctacgaggagtttgtcattccgctgacgaaggacgtcgaggtgcgctgctgttgctccgctagaggctgatgagacctggaccaccagccgcctgattctgattgctattcttgcctgcaggtcgactacctcctcacccggctggagggcgtgtcgaaggagcagatggacgcctggcaggccggcggcgagtcatgcgcctagagggttccgcttaatcttgtcctttgactttataacgacgcggatagatgtcggcctttgacgagctctcagacgcacgaatgtcccgcccttgagagaggcgacgaagccggcgaggagaagcagcgagcaggaagcccgagcgcgcgagccccttttatctgggcgggcggtgcgacagtagcgagctcccgaccttcacctcgacctcctcctttcgacctcgtctctagcccagcctcgaccgcagccttccttctcgagctcaggcagacctctcaggcatcgcagacacacggcatgctgctcaagctcggccggtctctcggcgacgccctcgcacacggcagcctgtgtgcaggctcaaaagctggtcgaggcccttgttccgatactcggcccagcgtcggtcctcttcgagacctattgcaaagaaacccctctctgatcgactcgtcgacgtctaatcgggttcatcccgcagaggccccttacgagacccatcgtagccgagtccgctgcccggcgttggaccgcacaagcagcgtgcaactggttgccctacacgcgcctctctgcttacagtcacatcgccaccgccgttgtcttgagtcggcgcctcgagcgacacccggttgccgcctttcaccaagcacagcagagagggcccgacccggcacccacgcgcctcgcctgtcttactcaaggaggagcttgcagatctgacatgactgacatccatcaagatgtcaagcgtgcgtcctccggctaacgcgcaagaagcagtcgaccggcttgcgaaggaagccttctcgcacctcgagctgaggcagaagggagggaagtcagggcgactgcgttagcgaccggcagtaagcgcttctggcttggacgcacgaccgacgtacctcctggccgacgacggctgtccgaaagtcaaatttccaggcaagcgtgctgacgatgaggagcagctccattgccgcgagactgcagtgtatgggtcagcgctcggtccaaaggagccgcaagcaagaggtgggacgcacttgcgcccgacgcagccccgagggccgacactgaaaggcataaacgccgccgacatcgtcttctcgtcccgctcgaaccatcgctcgggccggaagacgtcggggtcctcgccccaggcggcgacgttgcggtgtaccgtgtacgtctgtgcgagcgaagatgagctctggtcagtgcgagcttgcagaagaggacagtgtcggccaactgaccggaacgctgagaaccgtgccctcctcgaagaagcgtccgcagacggtcgcgccgccttcaggcgcgacgcgcgcgagcccgatgccgctggtacaatggatgcgcagagcctcgtcgatcaccttctcgagcagaggcagcgttttgacctgcgaagcgaagacagaggagcatcagcagagtcgcaacggacatgaagggcgacggcgacgtacgtcgtcgtacgaggggaggtcggcgctgagcgggtcaagatgcgcgagcgctccgtcgagctcttgctggagcttcaagagaacctcgggattcgcggcgaggtggtagaagatagcgcaggacgagttggatgtcgtatctgatgcgtgggagagaacgcagtcagtctagcagtcaggcgagcgcagagaagacgcagacgcacccgagccggcgatcaactgcgtgagcgcctcggcagtcagctcgtctcggcccatcggctcgccgctctcgtccttgcccttctgtagcttcgacagcaggtcctgcggatccgacgatggcgggttctcgagccggtggccgacggccgagatggcaatttttgcaaggttggcaaccgacttaaggcgctgcgagacccaagggaggtatcggacgtacgggctacgacaggcgcgagtcgagtgtcccgggtcagcgctagcggtcggccatggtgggtcgtcgaaaggggcgtaccgcatccagggcgtcaggcagccgagcgtcgcgctgacctcgccgcgctcgttgagcactttgatggcctcgacgtagaggacgtcgcccgaggtttcgtcgcgaccgacgacggcggcgtcctggcaggtcttgagcatgccaaatggacgaccgaaagcgagcgttccgatgatgtcaaacgctaggtagttgtagaacggcagcacgtcaaacacggtgccgggcttgtcggtcgccggcgcctttgcgagcagcgcgtcccactggtcgcagagctgcgtcaggcagtcgtggatcgtctcgccaaatttgagcacattcttctgcgagaagacgtgcgagacgatcttgcgctttcgcgtgtgctcggctcggtccctagggtgtccgggagagcgcggagagagtcagtaaacgatgagagcttcagagctgcttccgacaacgcaccgcgtgttgaagacgccgcgtcgaatcgagacgaaggcatcgtagaagctgcagcaggataggatgtcaggaagctggacgacacttgaagcctctgaatggcacgcactcggatttgaggaagccctggctgtggccgaggacgacaggaatcgcggccggatcggcgatcgagacgtggttcggcgcgaggcgcaggaacttgcctggggcgcccgaggacagatggcgaggggtcagtcctgcagttcaggggtcgagaagcgacgggaggacgcgccatactgggcgtgagcggcgtgcacggcgaggctgcgccggccggagccggctttgagagtgagccagagcgaagagaatcggttgatgagcgggcctgggatatcgtgcagcgaagggtttgacggctccctgaggagcctaacaccgatctgcagagataatcggaagagaggctcgatgatgagcaaggtcgcttcccgagggggaaaggggaagcaagaggggaccggcgtacggcaagcaagagcgcggcggagccgacgaccagcgtcgtcagactgagcgtctcgccgtcttcgaagagcccaagcatgagcgggtgggtgagatgagcggcccgatcgaaatgggccaggcttctctgcaaagggagaatgagcgaaggccgggagggtcaagaggatcgtcgtcggatgcttgactcgtgccgtttactctggacgagcccgcctcctcccttcaccatcgccttgctccgcctccgtctcgccagatcggtcgcctcgtttgctcggcttgcctgtcagagatccacgctagaaatgttcgcctcgacaagcggctcgcgcctcgtcgcccgggcggcccggctcgacctcgcctccctcgccgcgacccggccatcctcctcgtcatcgtcccttcttacccaagcccgatccctcgcagtgctcagcactggctgcagccgaagccaaccagcgctgccgattgtgcctctggtgctccactcgccagtctcgtcccagccggcgacgtctttggtctggacgcttgcccgtcggagcttccacagctcgcggccgacgtccgtcattcgcgactcgtactaccaggacgaccgccggcggtccaactcgcgtgacggtggacgcgggccggctcccaagggcggatgggaccggctcaagcaggccttctgggacgccgtcctgcgcttcgagcgtttgccgtctaacgtcgtcgtgcgtcgtccctcgaatcgcctgcgcacatgccgccgcagtcgtcgttgaccccgaactgcccctctcgctccagctggcgctcgtcgtcgcgcctaatcttgcggtctttctcgcctggcaggcggccgacttcttcaagtcgccgaacctcaagcacttcctcatcagcaacttcatgctgtccgaggcccatgtccgggccggcaaatggtggacgctgctctcctactcgttctcgcacaccgagatcctccactttggcatcaatatgttttgcctcgtctcgatcgccaagggagccatgtcgtgcgtgacgaaccccttgcgatgcgttctaccggctgaaccctcccttgccctcttgcgtgccgccagggtcatcggcaacacgcgcttcgtcggcctctacctcctgactggcctcggcggtggagtcctctcgttcctctcccgccagttcatcgaccgaaagggtccggccgtcggtgcgagtgcctcgatcgctggcacgctcgccgtgagtgtccaccgctccgtgacgaccaccgggagactgactcgcatctcgtcttagttctatggcgccgccttccccacacggcaagtgctcgtcttctttgtccttccgcttcagctcaagtacgccatctcagcctgggccgcggtcggtcctcacccttgtctctgtccgttcgtactgctgctgacggtttgtgacgctcttgtcgcacagtacgatctctttgccgagttttactacaaaaacgtgcgtttgcatgactccagtcgacggcgcgtcttcgcccatcgctgacactgcggcttccttcctccccccttctcagcgacgcgccgtcgacggctccgcccatttgggcggcatggccgccggcgtcctctttttcgtcctcctccgacgaaagtaccgctggtgacgttcgacatgagcatttcagattccggagctagggaagggattaggttggagacgggcgcccaaaggggcgcagtaggcgatgaaagagggccagcagcggcctaacagaaaggtgatgagaagctggattggccgagacgctcagttcttcaggttgtcgtcctgcgacgagccgcagcacgaggcaaagaagccttgcttcttcttgggcgcggcagccttcgccggcgtcggcgccttggcggcgggcgaggcagtggaagcagccggggcggcagtggcggcggcgcccgcgggcttctcttccttggtcgtcgcgacgggcctgggcagcaggtgacggatgaggatcagcaaccgtgcacaagggggagagaaggagtcaagcaagacgcactcggcagccttggtcggctcggcggcacgggtagcggcaacagccggggtggtgttggcagccggggcggcgttgacggccgggttggcgtcgacgaccggggcaggggttgcctcgaacgtcgactgtagccgggcatcctcctcagggacagggacatcgtagcctgacggtaccggcagcgattcagaaacgtcagcgaaattaggcttgccgagagcgctgaacatcgcacgcaccgagggccttgttctcgccaccgggagcgaccgtcgtcaggtcgacaacagggcccttctcgccgagaggggcgccgaggctgccgagagggttggacgagccgttggcgttggcgtggctagccgcggcagtattgccagcaaccgcagcaccgccagcgatggcagcagcgccaccggcgacagcggccgtgttgctgcgatgagcggtcgtcgtcgagggctcctcttgcgcggcaaccggaccagtcacatcggcgacggccgcagcggcgaccggcgtcgcttgaccgcgaacaaacgtcccgacgatctcggcaaacgacttgccctgcgtccggccggcggccttgtcgtcgtcgaggacagggagcgagccctggccgccagcgacgtaggacgagccccaaggcgagccgccgacaatgtgctcctcgttcgagatctcgggcgcgcggtagccgagcgggacgtaggtgatgcctatgaggggcaagaggtagcctgtcagcatgaaaatgacccagaaaggagtatagcaacgcaccgtgatggctgaagaacggcaaagttgtgaagatggtcgtctcctgaccgccgtgctgacccgcggttccagtgaagatgccaccaaatttgccaacgagcgagcccgcggcccactcgccgccggtctggtcaaagaaggcgctgacctgagccggagcgcggccgtagcgggtcgggaagccaaagaggaggccgtcaaactccttgagctgggccgctttgatgacgggcaagtcgcggacgggcgcggcgcccatcttggtccgggtcgactcggacaggagctcctggatctgtacgacacgcgtagacgcattctcagcggcgcgcgattcggggcgtagcaaggcgccagtgacggacctggaagtgctcgacctcggcaccggtcgaccgggcgccctcgatgacggcctgggcgagcgtgtcgacgtggccgtacctgaatagacgggcagcaacaacaaggcaggtcagcaactatttcagcagcagtaactgcaagctgaagacggagcactaacgtcgtgtctgccggcagtcgatggagggcaagatgggtccagtcagccaacgcgctggtcgtcgtctgaaactccggcgggcggccggccagagcagggcgatctgtttgcctcgaatcgactcacacgtgatgacggcgatgcgaggggtggtagatccggccatgataggaaaggtttgagtagctgagagggtcgtagctggatgtcagctggtgagcacggcaggaaacgggggctgatggagttgggctgaggtcgctcggaagcggaagagcaaggtcgagagccggacgagcgagccaccgccagcctggctgagcgccatcgccccaggcggtcgacgtcttctcgaagcggccgatggctaggccagtagcctggccaggaaaggacgtacctgctgaatcaaagtgagaggatgggttgtggggtgggagttggtggttagtgggctgaaggctcgttctccggcctagtgctgctgctgttgcttccaaatccgtcccgtcagccctgggaacagcgggctcgccggccacgcagcaaccgtcatcccttcgtccctgagcaaagcatgtccgatgcagcagcagcacccgtcgcggccggcccggtgcccgcgcccgagcgctcgatcgacgaccactttgccgacgtcccgctctttatgcgcgacctcggcgacgagccgacggtcgcgctcgaggccttgcagtcgctcgcccacgacggcacgccggacggtgcgtccactcgagcacgtcgcctctttggcgcccctcggctgatgctgacgctgctactgctgctacttttctgctgatcctccaactgatcctctggccgacttgacctcgctctcgttaccgctctcgtcgccggcccgccagaggtcgcgctcaacttcaaggagcagggcaacgagtactttgtcggtaagcggcaccgcgaggccctcggtttttacacccagggcatcgaggcttcgccgaccgacaaaaagctgctcgaggtgctgtacgttaaccgggcggcgtgcaaccttgcgctcggtgcgtccgtcttctccaaagccgagcgacgccggagctgcgcgcctcgagcttctcgccttgcgttgtgcgacggaaaggaggtcgcatgacccaactcggtctgactgattacgctcctcttcccggtgctcacagagaactatcgccaggtgctcggcgactgcgccgacgccctgacgctcaacccagtctcgatcaaggccctcttccgcgcctcctcggcgctcctcctgatggagaagtacgctgaggcgattgactgcgccgggcgcgggctcaccatccctggcgaggaagccaacaagtcgctcagggagatcgtcgacaaggcgacaaagcggaaggaggtgaaggagcggcgcgagggcgagcgcaatgagcgcgcaaggcgcgagaccgagggcaggcaggcgctcagtttagcttttcaggtgcggcccgacgctcgtcagccggctgcaggaggtctgactggaaccggagcgctgacgagtcggtcgtcgcaacctgcaggctcgcggtctcatcgttcagacgtcggacaagccgcctgacaacccagcgccgccgcacttcgacccagagtgcatccccgagacagcgctcccttccatccctttgtgcgtgtcctctactctgtgcttaagcttcgcctcgctgactcctctctctgcctctcctctcaacgggcgacaggctgcctcacccgtccccctggcaggctccgccagcgtactgcccgctcatcttctccgtcttcctcctctacccttcgcacggccagtccgacctcctctccgcctttgacgagacgacgacgttcgccgccaacctcgccgaggtctttgcctcgccgcccgcgtgggacacggccgggctctatcgctcgccggccaacctcgtcgtctatgccgagacggccaacaaaaagctcctcaagattccgcgtaagatgaagttgatggacgtctttgccgccgcggtcggcactgggacgagcggcggcgacaaggacggcctgccgctcagggacggcctgctcagctttgtcgtcctcccaaagggcgcagaggaagacaagtgggtggccgaggtcaaggcgaggcgggacggctcgtaaggcggccatcttgctacaaagaaggagtcaatgttgcactctcagctcgtcattcaacgcctcgcgctctcaaggggaagggcagtcagaaggtcaaacgcgacggatctcctcgaagcagcagaacctacagccggcccgctcgaccttgctcttccttgaaaagggtcatctacaggatgtccgcgagcagggaccccacaagaggcccccaacgacatcgtcttctcctccccgacaatcccctccctcgtttcaacgtgaccagaccagcaaacagcggacatgcgcttagagcatgttgtagttgccgaacttcagaggagggaaaaaaagggcgtcagaatgcagtccgggcgagcgagcaacgcaaggggaccaaccttctccttgaagccggggacctcccacttgcccttcgagatcatcgtgtcgaccgcctcgtcgagctccgggatcgccttggcgacgtcctcgacaagcaggtcgtcgatcggccgcgactgctcgatgttgacgagggccgccttgaggtcgacgagctcggtcttgatcttgttcgtcgtctcctcggcggcggagacctgggaggatgcggagaggacggtgtgagtctctggcatgcaaacggcggggcgtcttcgcaggctcgaacagaaaggaatggcggccccagagagaagtccccgaggaggggtcacggcggctgagcagcgaggagcaggaactcaagccatcccgctcccgaacgcccaagagcgcacgagcgagaaaagaccttgatgccgcctcctcagggcgcccagccgccaggacctgacccagctcgtcagccccaggccctccatcgccctccccatgaaagtcgcctcttggtcccatcccagccctcctaagccaccacgtccgcgatacctctcgtcttgcaaggccaggcgacgcctctaccgcccgacgcccaccgaaaggcctgattagggccagactcgccagcccaagcggcgagcggcctgcgagcgtccctgcttgtctgtctcccgacaaggaagaagcgcccaaatccctccgctccctacccgtcaccttttggtacctgaaaaaggaggccagaacgcgaggcgaaagtccaaggccgaggcgaacggggacgcaccgccttgacctcaaaggcctcgatcgccttgatctcctttgccgggtcgactgtcaccggcttaaactcgcggattgccttctcgagctcgtcgacaaccttctggttcttgaggaccgagcggtagtgggcaaagtcgatcgtcgacgactcggccgtcgccttgagctgggcgttggcgagcgaggcctcggaggcgcgcttgcggaaggcgttgagggcggcggtcgtctctgcggccgggcaggaggtcgaggcagagcgcgcgtggcgggcaggaccagagcgtgatcgggattgaccagtgagtcgagaggaggagggagagcgaggaaggggcgaaggtcagggcaagatgggaagggctcgtcagcccgccgttcctccctcgagctggtcggatccgcagaagacgcaccacggccgagtccgtaggacgaggcgatccgggaccagtcctgacgcgccggcgcaggagaggggtgtttgaggcgagtgtcagcgagcagcaccctcttttgcatcacgcccgcgctcgagcagctcgacgcctcgggccggcggcgctcgtcgggcgctgggctcctctcccttgccggtcccttcgcgcaggatccaatcccgagtgagctgtccgctcggacctgaagaggacgcacgacgacggctttggcagtgcgggacattttgaagagagaaagaaagaaggaagggaggaggcaagggtagggtcggaggctcgcgggcagggcgcaaagagtcggtcggccaggcggggcggcgtcaacttgcagatgccgtttagcgccgggaatcctcgacggcgaggcggcgacgacgccgacgacctgctccaaccaccgacagcagcaagatggccgacgtagagtacgacgacacgccaatcgacgaccaggacgaggctgcggccgtgcgtacactcgaggcgacgatgaccatgagctatgggctgacctgagccactctctcctcccctctgcttgacctgtcgcctgggatgccggctctgcaggagctcgaggcgatgaagcagcgcgtgaaggagatggaggccgaggctgccaaggtgcgtctctgctctgctcctccctgcgccggtcttggtcgttatgcgcggacgcacgcttggcacaccatgatccgacgtacgatgctcgcaccagagatcgaggagactgacgcctatccgccctacctcttcctacgcagctccgcgagcttcaagccgccgccgagcaggaagactctgccgccgccgccctcgctgccgggacctctggcgcgccctctggctcgcccgcgccgccagcggccggcgccgccgagggtgcgagcagcgcaggcgatgagggcggggctgtcccaatggaggaggacaaggaggacgtcgactcgcggagcatctatgtcggaaacgtgcgcccttcttgacgttgctccttctcgcgttcggggtcacacgagactgatatgcctttcactttgttggcaggtcgactacggcgcgacgcccgaggagatccagggccactttgccgcctgtgggcagatcaaccgggtgacaatcctttgcgacaagtttaccggccatcccaaggggtccgtcctgcctcctcctcttcttctcccgtccttccgcatcaccgctgacatcccaatcgtgcgcgcgtccaaagcttcgcctacgtcgagtttgccgagcccggcttcgtgacgaacgcgaccgtcctcgacgactcggtcttccgcggccggccgatcaaggttacggccaagcggaccaacatccctggcttcaatcaccgcggccgtggcggccgcgggcgggggaggggcggccagcgcggggggtacggcttccagggtaaggacagtagggtaaacgcttgtaataattcgatgatctttggcgcgagaggtggaacaatgcaggaggaagagggaggttgtaaactaggcgtgaggcttaagtcttgtaaaagagacgcgtgaactttcgaccatgcaaaattttctcaaggtattttgtctggcggaaagctgacgcaggggttacagatgatcaaatgattacgatgctgcacgctaagggggagagggagctgttgggtggcggcgcactagcactggccgtctgtagcgcgccggcgccgcgcgaccacccgctaagtgccttttcgagacttccctccctcttacctttttgtcttttctttgtctcctcttcgagctcctgcgcagcggctaagaacactgacgcgcatgtcccctgcccttcatgcgtcagctctcgcgcgaggacgtcatctacaccgccgccttcctgactgagtgaagcccataatacagggttgggcacgagcgcatcggcgctcctagcagcggcgtgaagcgtactcctctcaaaagaggtcctcggcccgcgtgagggccgcatcttcggcggccagatggtattcctggatgactcgactgcgagccggacgacgacggcatcacggacgatggcgaccgcttgaggaagctgaaaatcaagggtggcgactcatctcctgaggcccgcaaccaggccgccgctgccgatctccgccagggcaagatgggtgttcgccgcgccctctctgctgcctggcgtccgtcgccgatcggctgaaaccgccgcctctcttcgacagggctgagagcccgacatgctggtgcctgtacgcaccgtcaaggacggacgcaccggtgcgccgctgtcgacttctctgtcgactcgaagggcctgcactcacgctttctccggcccccattggtcctcgctcgcgctttcgcaggctacgccgccgaggaggagctgcgcgacggctacacgagttacttagttgtcgactaccagctgcggttatcctcctatcagaagggcgagcttacgccggccgcggccagatcgagaagcggtagctgcaggtggcttttgacaagggcagggtaagtaagcgcttcttctccgatgcgacttggtgttcttttggccgaccttcccgacctctgacgaacccgagcagctcacgaagttgcagttcaacgactgggccctcgacctgctcctgcaggtcctgcagagccggcgctactgcgaggtggccgcgtggccgaaggtcggccagcccggcctcgacatgaagactcggtggaatacgatccgctttccttctcaccctatcgggcgttgaagtcatcaaatgcagtctgtcagcctgtcagctgacggtccaaccctggaaatcggcccgaccgggaaaaatgacggacatatcctcgtcaagcccgacgacgacgaaaagttccattttccggccgcaacgcctttttccggcttgggtcacagtcgtcaaaaaggagcaccgactcaaggctgttgagggaaggatggacggagtatactacgtagagtggggtcaggacgtgttacaagcggtaatctgaggagcagaaaggtgggactgatctcagtcaccaaaaagtggactgaggtctctatggaaggaaggggagcggagagctaaaagggagagaaaaaaaaggagaaatgccgatgcgttccggccaccagcgcgcgcgtagccgcctgttgctgctgctcctctgcacctcgcgccgcgctcgtcccaactcctacacgacgcgcgtttgcctgctgctgccgctgctgaggccgatttcggccgggttagttggaggagggggaatctgggccagggcaggagcgaatgagtgaacttcccctcgttctgcaggctttcgtacgtgctcgccgggctgacgccgcacaccgcttgatcctttcgagtgtatccttgtacttccgcctgggacggtcgcgacgattgagaaaatcagtcttcagctgactccggcgggtggttgcgaaacacctcacttgagagaagaggccggagctgtagcggacaagagcaaagaggacctgctcgtccttctgggcgtcctcgagcttcagaatgattctggcgcgtttcactggagcagccgggtaattggcctcgtcgactggatgtacaggctatcaaagcggcctgattagattgaagtcaaccatggagaaaaatacactcgtccagctctttctcaaactcttcctccggctcttcctccagctcttcgtgggtgtcttcgttcgaagcttcaccggatcctgcacgactgatttagacccaggaagaaaccgactagaggcctttgagcacgactttgagcagcgcatgcgcgcaccaaggcccagcgccctgatgttcagccggctgacgcgtccggtttgttcctccggccagcgacgagagcagcccgacacagacgtgactgaggaacgcagtgttgagcgtgttgcggtatgcatctttgatcaagaacgtccaaggtatcttctgcgggtatggccggtcggattgtgtcccactcggctacgacacggtcttacgtcgatcttatgcacgaccccgtcctaccctcttcctgcaagcgcgaactttccttgctagcgtgctgccacctatcctcaaaacatgacgggcatctacgagctattcggcagtcgactccactcgtgcgtctcgtgcccggactgcaaccacactcggacacagctaagaatgcggccccggtagcaaatcgataaggccgccgacgccggcctgcaaacgagtgctttatggtgtttctggcagtgagcatcggggccgttctgcaagcattcgttgtgcccatgccggcgaaacgttgacactctaactgggtggccgatgaggcgttggctgataagacagagctctagtggaaaagtcagttgcaaccagagcggcagcagcgtttattggggcgaggtcgaccgggagcaacgcggtgacgatcgggcgagggagaggaagatgatactgcgtaggcgccttctcgttttggtgctgccacttgatgtgctcggcgcgcagggttgaggcgtggcagcgacggtcacgacaaaaaaaagaaccgcggccaagcaagacggccgagggagtgtcttttggggtgtagttggaagtagacacattaaattcgaaggtattcattcaatcgatcaggtgacgggggagggttctcgtcgctaacaagattcaaagaggatgaggaatgggaatgtcgggggcgggaaagtggcagacagtcagtttgcaacaaagctccagctgaagaagacaggtgagttttggcctcgccaatacatggaagaaagaggctcaacccagattcaatttgcgattgtctaagatcgccgaaggttgtctcaggccatttcaactcgtctaaggtcatctaatgtcaagctgacttctggctcgaggtggctgaatagatagtaatgctcgatagaccttcaaaaggccgctccggaacatagttctgacagtagaacgcaaacttttgccagcaggcaatgcgcatccacatgaccgtcgactgtcccggcctttctgggcttaaggctcagtaaaacactcggcccgtcagcatctcgttcaagcgatgaggatggcttgctgtccacaaagacggggacaggacactaagaaggtcctttgtcaattcgtgaacgtgatggacgctagcaacactcttcgacacgcgtgcatacatacaacgcatgagcaaatcggctgaactctttcattcgtcctcacttttcatcggacaggacaaattgctagccattttctactctgcgttcaaaccagtagtgtcagatcaccccttatggatcgcatgaggggcatgagcttggcgcagtagattgagactgctgttaagtggatcatctttgcaaacaacactcttccttccttctccggtacttgcaaaagccgcctccgtttttctctgcttgtagtgccacaagacatgaagactttttaagcatgtatataataatccatctaccgcaccggtgtcctcatgctgatgatcttcatatttgaggtgagtccaatcaattgacagcgagtgaaggccttttaagtggcttcgttcttcgagtctagcggccggcgcttgagactttattggtcatcaacacgacgactaacgtcgacgcacctccagcactcgcctcgcccagatataagctggccggcacttgtcctctaacatctggattttggagctactgtcaattatgtatacctcttaggtttgctctgttgcaagccttttggaaggtgagaagaatgggctgtaactaacgtcgcacatcgacagcgtcgaaagcgcgcacgcacacgaacggacgctaagcaagactgcttcttatattttgacatccgaaagggcagggactaaacactgacgtggggcaatgatgtgccgaccggaccacgaaccaactgatgcggccgaatgacatacgcgccattttatgtaattttggcaggccgcgctcgactacgtgacgcctgatttggtgaaaagcagataaaaaggagcagcggcaatgggcttcagcgcttccagccaaagccattgatggactggccagtcatagctgtgttcgacgaggctgaggaagtttcagggacggctacgcaagaacaaccactcacttgagaactggggcatccggactgacagagccgaggaggtacattagatcgctatctcacaggtgcatgatcaccgctccggtgaccagtggttccacaatacgcggttttaagaaaaagcaatgatgtggcagagacaagctctgtcaaagcattcaatccttactcagcactttcatacgtcgactgcataaaagtctgcattacttgactacacgttcgttatggtgctcccgtaggatgattgaacatgtctcatattataaccggcctatcagtgctgccatcggggggcccgtctcttgtatcagtggctgcaactagctaaaagcccgctctcagtacgtccaaaactgccctgggcgatgcagatcaggccaaaggcggctacaatatcttacagatgttatgacaactaacgcgagcctctcctcactgtcgacaaagcgtaaagtagaaagggtaaaacacaaaaaaaggtgggagcatgtcatgcccatgaaataactgttgccaatcttacgagtgttcttgggagctggcagagagctattcaaacagtgcagatcagcaacagagcttgggcagagttacttggctagtcgaagatcatcttgaggtcaatcaataatcttcttgttcctttcttgtccatgcattatgtaagcctgaattgcagttggagcaaaaagcttccaattgttagtcgaaagtaagccattgttaggtagggacgcagcgagccctggtaatgatagaacaccgagatcttcttgtgccaccatactctggctctagaattcctgacgtgcagaacgcattggcatttctcctcttttctctcaaagaaggacgtctaggccgctcttggcatcagtcgctcgagcctccagagatgagaaaaggaatcttggcttgtaggcgggtccagcgtcccaaacggcaagacctactcggacaccttgaccgaagacttaaacagctcgtcgctcttcacacggtcggcaatgctggcgtcggtcaatgcagggccagctgagcgtcaagagcgacattgacaatatcagggaaaagtccttgaagcgctcatacggactgactccgcctactccctcaaaaggtggggcaaaaaaatacagctcacgaacccgacaagcctttctttgacagagttgctggccgatttacacgtatcgggatcgctaccacgtgcatctccttttatgtcggtcgctggtatccttttttacgcaaggcatttgttcaagagcgtgagcaggatctcggtgggcggctgtaccaaatgcggtccggtcctcgtgcgctgttaaggccatgcttctcgagagatgactttcaaggcggcgacgagcctcggcgagattgccagctgctttgctctggtcgactccggcctcaatgcggccctcgctctcccttcttcagctgccctggctctcagtagcggcagtgacaagcaaaacggcgttgcgagtgcgtcttgctcgccggcgccgacgggcggcttctgctggccgaggagatgcccatgtcggccccgttgtcgacgtttcacgcgttcgtttgacctcacaaaggacccaggagaacgaacgtgcgagtaagacgaaaaaagaggcaggtccaactcggtcttaggactactccgtgaataactgaggtaatgggggggagcaagcaggtctagttaagagagtgagtagagggggagcgaacggagagagagggaaagagtccggcggactctgaggcgcggcgcccatgtggccactgggcagtcgccagaatttggcggcgcgcttgatttcttgcggttttcggccggtgctggcgcagcaacaccttcaacaccgccgacgaatcctgtatcgactcgaagggcctacactgacccttactttgcttctaatttgtcctcgctcgcgctttcgcaggttacgccgccgaggaggagctgcgcgacggctacacgagttacttagttgtcgactaccagctgcggttatcctcctatcagaagggcgagctcacgccggccgcggccagatcgagaagcggtagctgcaggtggcttttgacaagggcaaggtaagtaagcgcttcttctgcgatgcgacttggtgtcttttttggccgaccttcctcgtgtagtggccgttatttgagtgcgactttgcgtgatagataacagagttgagtaagtgcgtgcatcggcggcgccgccgaccatgtataaggagaaaggttgagggtctggtcagtagctaagacgttcttgagcttgtcaattcgacgtgcctgctcgacctcgcgcccgtcgacaaccgttgtaatgatcaaccggtcgaaagcggcggcagtagtctacctggccctggtgcgcctccatatatttgtgctccacctcggcttgcatgcgtccaacggctaccgacctaatccgaaagtggatcgtcggctcagcaggagaaaagggctctacgagggggggcgtgaggagagggaggaattagtatcaagacgtcaggcttgcctacatgaaggcacggcaaattgagatctctgcgctggtaaaggtggagaaatgaggctgcgagtcggaaggtagtttaagcgagattgagcgtcgccttcatgcaaagcttggaatactctgtacgcatacgatcacatgtacggtcggccctccggaatctaatccatcagctctcagattaagtacgtttggtccgccggagcgttacttctgtacgaagaaagggtagcgggcgggcgtctagccaagtggagagagcgaaaagagagagaaggaaagggtccagactttctgaaggacaacaagtctgacccaaaggagtggacctgggaggccgatggcgagcggaccaagcttcggcacctcgtctgggccttccttcggttcggcatccgcgctgccggggctacgagctgggcagcctggcccgcccaacggcaaccgaagctgctcgactgccttgagctcataatcaaaagcggtctcaacgaccgggccatgttcgacaccgttttcaaggtatgtctgtctcctatgatcttgacacgcgcggcagcatgctgaccgtctgctctctttcccgtgcagctctctctcgtcaaggacgacctcgccggcaatgtccgaagcttgtccgtcttgccttgtctagtcctaagctgatgcattgccaccataactaccttgtcgacatcagctcccgcctcaggctattattcgtccagaccaaggtcgcgaagctgccggagactgccgaatcaccgagcaatcctagatttgaggagctccggcatctctcggacgcgctcacacagtcgacgcaggagtcggcgatgacgctcgccggcagcgggccgagagaccgccgccctcaacaatctcccgcttatcgtctagcccggcttgtcggcacgaatccagggtcgcatcaattctcaaccgcgcattcatcgtcctcgcgttcgagtggcacttggtcgaatttgtctcccttctcctcaaccttgcgactcggtagcgcgcaaagaaaaaggtgggcgaccagggcgccccgacggtcctgcttgatgagcttgcggtcgccggcgagacagctgcctcgaaccgtctctagaagactgttgtcctcatgcagacggtcgcgagctacgacttccccttcggctggtcggctgcgcaaatgcgtcaagccctgtccgagggcaagcgctttgccgacccactcgacgccatcttccccaccgccgactatgaggctcaggcgctgtaaaacttctcaacctttgccccgccacctccctacacgatcgaccttctcgctgtctcctccacgttcgacaggaacttcgccgtcaacaacacgtcttacgacaacacttgcgacgcctacgtcctggctgtccaccctggtggccacaaatgggagatgtttggctcctacggcgggattgagacgctgcctatgcctggacacggcgtccaggccgaaaagctcaaaaaagatgccgacatggacgacgtcgagggccaaacgctgttcgactgcgccaacgctacccccctcgatcggtcgcctacggcggacgagtacaccaccgacgagccggtacataccagcattccacccgcaacatgtaccggtatcataccagtaggcatactgatatggtacaggtacccatactgttatggtactggtactggtaggcctattggtaccataccagtatgttttcgatttttcgcctgtttaagagattagcccctcaaaactttccggatacctcgccaaatatacacactgaatttgaatgacattcgctgtgttttgcgctcagtagaggctgtcacagtctgggcggaccatactggtaagttaccagtgcgcatactggtagggtactggcactgtaccggtatggcataccagtatgcctactggtctaatattgatatgtcataccagtacatgcgccgggtagcctcatgatgatgtaccaggtcggcgactgtgtagaccttactaagatcgcgatactcgaggatgacggtcgagattgggacctcgccaacgacttgctggatgtcaggcagccgcgacttgagcatgagcatgagcatgacgtgtggccgatggtactgatctggcccgtgaaggataccgtcgctgccggccctgaagtagaccgtatcggtgacgcgagcgagggtgatgtagttgagaccgttgggaagttcgagcccgagcatggtacgacttagggtgagtagaacgagctgccgaagcgtgtcgtccagcccccgaggtcgacatgattgggcacctctgctgggacgtcgtccggaagcgatcctgggccgacgacaaactcgaggtacaacagctgttttgagacggcgtgccgctcgaggccgacgatgggtcgctgcaactggccgcagacgatgaggccctacaatgtcacaggaggctctgacaggccggcgagccagtcaagaaacgtcgcgcacgactgatctgtcccactgacggtgaagggttacgagttagagtgaggggctcccgggtggccgctgagcggttgtcaggggctggcggcgcgcttaggttcccgccctgcccggccgccatgcgcagcaacaccttcgactttcgatggttggctcggccacgccggccggactcacggcgttggtcatgtcgtcctctgcgacgaatggagatgaggtacccagacgacggcttacgccctcacattcgaatggacgacccacttgcgccttgctgatgcgtcctcgccggtgtcctttctttcctgcaggtcgtggccgatcttcggacacttgccgcctgttactcaagcttttggtccatatccattcaagtagctccggaacggcttcgaatgcgtccgaccacatttgttttggaagcgcttgagctggttagccatcaatgttggctttcgatgttgctgttgcatagtcacttctcgcctctgcaatgcgcgtgggcaaaatcgagagggatagccgacgagagcactataaaggccatcagcatcgtgaagaaagatatcacccgtctccggttggtccagacgattgctcgcttcgtctggcacgcggacacggacttcctcctcggcctgtgctcggagcacggcttcggcgccgactgccggctcgacaacgtcgcccttttaaaaaattccaggccggcctctccgaaggcgtcttctaccaggctaagattttttcagtcgtcgctgtccagattcaccggaagggcttctatcacgctcttccgatcgccgtcttcggtccatgcggcattgaccgcgaccgagcagccgagcacgccctcctcgcacgagtctttgacgcagcgaggccggtcctcggtcatggttcgaccctgctaacaaaagcagatcccggctcggggttcgaacccagggcctcagcccgcacagcagaagagaagacaaacactaccagttttcaacccgtcaccggttgacaacttccacgtggaacctcccgcgggacacccgatcaccactggccgagtctagacccggcaaccctcggccgccgggcgttctccggcaccagctccgccggcgtgagtcaccagctccaccggatcagtcagcacctccaccggatcagtcagcaggcacagccttccagaagattctccgccaccacactccagcctacttaaacccctgtagacctcgagtcgccacctgaatctcaagcttgcctcttcgttccccccattacccgtccttgccagtcagggctccaacctccccctgctagccacttacccctaaaatcctcacctcgcacggcatccggctcgtggccccactacaccacggctgagccggcacatatcagtatctcacccgaaacatttaacagaaccgtatcagtaggcttactcgaacggtactggtagggtcgccattggttaaacgctgataggcctgctggtgtggtactggtatgattactggtatagtatgttggagttgcgacgagtgcggcgcggcgcgcagagccagcggcggcagcaggcggctgcgcgcgcgctggcggccgcgcgcctgccgatgcactcctgacgcgcggactgcatcggcattcctcctcctttccctctccctcttagcttttcccttttcctccttccatagagacctcagtccacttcttggtgactgaggtcagtcccacctttctgctcctctgatcaccgctcgtaacacttcctgacccccactctaggtagctcactccgtttcgtccttcgctcaacagattgtgagcccatagcttcatcccgaacctacaattacgctacccacccgctacacgacacgacaagtcacgcgcacgtcaccaagaagtggttccgtccgcccgatctttcgccagctcgccgagctcgccccgacaaaacctccctttcccaccctcacccgaccgacacgacccccaccatgtcaaagcgggttcacgagcttaaaggagccgaggactaccagcggtggtcgctcacgcacaaggcttacatgcagagcgaggggctctggctctactgcctccccgtccgctcccctcctcgccctcgccctacctcatccccgagcccaacgtcgagaaggaccccaagggctggcaagagtggcagctcaacgtccagaaggccgtcggcaagacccagctcacgctctcgcgcaacattaccctgacggccgcccacgcggaccacccggtgcacctgctcacccacctgaagacgctcttcgccggcagctcgatgtcggacgccctcacgcttcacgaccgctactcgtcgctccggtgcgtggctggccaggtagtccaatatctgaccgacatggccgagcttcggtcccagctcgccggcctaggcgacgtggtgtcggacgacaagcacgcgctctcggtcgtccagggcctgtaggacggcccctacgacgacctccggcggcgcctcgtcgacttgctccacctcgagcccgaccgcttctcgtacgcggtggtcgagcgaatgctccttgcccggtcgcgcgaggaggaggccgagcgggtcgatcaagccctagcggcgcgcatgagcggcatgcgcatcaagtcccagggtcatggacaaagccgacagcagcagcatcagcgcacatccggtcaacaaggagggacgtcgctcgccggtaccggtcggtgctttaactgcctgcagttcggccatttcaaggtcaattgtcagaaccccacctcgaccaccatccccgtcggacacgagacgaggaggcttaccgagtccgagcggcggcttggcaggaagctcgtggagaggtgcgggcgagcgcggcgattgtagctggcgacgtggattcatccgattccgagtatcacgtcgtcagttctgctgcaagctcgttggggggagaggcggccgtcgccgaaggaacgacgaacatcgactctggctgctcgcggtcaatgtttgacggggccagctggctcgacgccgcatcgtacaagtaggacaagcgcaagaccttcctgggagacggtcggaacattgagtcagtcggcagcggcacggtcgagatgcaggccgaatcgcacctggtcgttttaaaagactgcttgcacgttccagcctggcaggcaaccttctctcggtcgcccatcttgtggcgtcgggcgtgcgctgcgccttcgacgcacgcgggtgcgtcgtcgagcgggctgggcacattgtcgctgtagtgcccgcgcggtcgtctatgtacgcctgggacgtccgtccaagtgcggtcgtgtcagccgttgctgtcagtgcgtcagccatcgacgaggagcttgcgcaccggtggctcggccacgtcggtgtcggtcgagtccgtcagacggcggcccaggttgacggcttcgagctgacgccgaaggagatgtcagcatgcgacgcctgcgccgagagaaagatgacgcgacgcaccttcagggttgcgtcggtcgctcgggcgagccgaccaggcgacgtcgtctcagcggacctctttggccccttgccggcgacggcaagcggccatcgatatggccttgtcattactgacgacgcgtcttccctgatcaagctttacctcctcaagaagaagagtgaggctctggcgtgcttcgagcgttttgtggccaagacggatgtggcaggtcatcgtgtccgggtcctgcgttcggacaacggtggcgagtcgttagcgcagcggtcgactcgtgcctggccggcaaaggcatcgagcgggccctcacctcgccgcatacgcccgagcaaaatggtcgtgccgagcgtgccgtaaggacgatcaaggaaggcatgcgaacggcgcttctccaggctgggctccccccgcatgcgtcacccatcctcccccgttcgattccacccgaaccgcctgattgacccctcggttaggtggcaggtttcagaaccgggcgccgtcgtctgcttccagtgggcaaggtttgagctcgatccgacaagatctcgctcacatttggaaaccccaactgggacctctttacctggatagtcgatacagtcaaagagcgtccttgaatccaagcgccgcgctgctcccgtccgctcacgagcgcacgagtccggcgagccggtcgtagttaacggcgaccgcgatcgcgacgccgacaacgaggaagccctgaagctggcttgagctcaacgcaacgacgggcttggccgcagcaacctctgctgccgaagcgaggccggcccgctccgtctgccggacgtcgtctccgctgccgcactgggctgccgacggttgatcgacggcagcgcccggtcgactcccgccagggctcggtgccttgatcgtcgaggccgacgtcgtcttacgcaagggatggccgccgctactgctgccgtcaaagacgtcggggccggcgccgtcgcccgatcggccgctcgaaacaccgttcgacgcactgccgaccggcgcgtcagcccctgctccgcccctgcggaggaagctcgaaggaacggatcctctcgcatggcctcccttgccgttgggcgggctgccactgctgccgagcggattgagcaggtgccgcagcgacgagtagcgacccttggtgtcgggcgaggcgtttggcgtcggcgagcccgatcggtcgagcggaccgccttggccgtgtcgagcgaggaagcgagcctggccgccttggatcgtgcctccaccgtccccgccgccggcgtcagaaaggccggccgccgaggtcgacgatgtcgagccgccgtgaccgtcgggcgagcgaccgccttcgccaccgtcggccatccagccgaggtcgtctggcccctcttcctcgttcagccggcgctcctcctcctcctcctcggcccggcgcttggcctcctcccactccttgacgacgctcttcattcgctcgcgctccgactcccacgactcgcgctcgcgccgccacgtgttctccatcgtctgcttccagacggcccacttgccctcggcctcggtcaccttgccctcgagctcggcgacccggctctcgagcagcgtcacggtcgagagcgcactctcgtgctgggtccggagtgagcgcgaggcctcgaggacgccgtcaagctcagagtggagcgtgtcgagtcgggcaacgagcgtcgtgttgtgggcgagcacgcgctgcgtgtcggccagctgctggacgagctgctgctggagcaggccgtccaagtcgtcgtctacatcctctcgctcaggatcagccgcccgatgccgatgcgggacgatcgtctcacgaggctgggaacctggctcgggcgttactggccggccacgctcgtgctcgtcgtcgtcgtcttcgaaggtccgctcgccacgagcagcgagcgatgaattttcgtcgtcgtcgtcgtcgtcctcggcgtccggccggccgttgactctggcgctgctcttgcgctgctgcttgcgaccgccgttgcgcctcggtgatgccttgatcgtactgatgcttcgcgtgtcgtcgtcgtcctcggcctccacgtcctcatcatcgtcagcggccttgtcgtcgtcgctcgcatcctcctcctcgagccgactcctgtactcgacctggccggcgagcatcgccagccgttcgcggagctcttcgacctcgcgccggacattctcctgctcgtgcaggcggccctcgagcgagatgacgcgactgaccgaggacgagatgagcgactgggtgtcggccagttgggcccggagcgaggccaggtcctcggtcgtttccgggtgaggcccgtgcggcggcgggtaggacgggtgcatcgacgacgtcgagggagctgggtttccgccgccgagcgtgtcgtggatgtcgttcatcgccgagtggaggatgtgcaggtcctgggccgtctcgcgcgacttttgcagctcgttctggaagggtagagggttagctcagctcaagcggctgatagcggcgctagtgcggctgggcgactcacggcaatctgcctcgtcaggtcgttgacgtttgggccggtcggcttctggttaccacggcgcatcgcaaagcgggccatcgcctgttggtaggcctggagctcgcgcgcgctcgcctcgacgtcctgctgcgtaaaaacgacgtaggccttggacgagaccttgtggtggacaaccgtcttgttgtcctcgccgacaatgtcgatgccaaactcctgcaggcggcggccgaggtatcgtaatcgcagtcagccagagccagtcgtagcagaggagacgagcgacgcacgagatggtcctccgacttgagctcgtacggctccgactcggtcgcctcggggctcagccgctcgccgttgacaaacgttccgttcgagctcttgacgtccttgatgaagacctgcgggaaagagggtgtcagccgggcctgccaggtgtttgaccgccggtgaggaacgcaccttgccgtcctcctgccagacctcggcgtgggtccgactgaggaccttgctatcaaagtagccgttgcgttcgccgggcatcgactttgcattcgtctgccggccgatgcgcatctgcagagaccgggcagggccgaaggtcagccaactgcggcaggaggcggaagggtggtcgggcgagcgacggacgtgggtgttcggcgggaggtagatctgcttcggtacaaagctgtcgctgagcgggtacaggtgcagactcggcagctggcccggccacggcacctggccaaattcgcccccctggccgacgccgggcgagtcttgtgctcgctgctgttgggcgtgctgctgctgggcatgctgctgctgctgctgctgcgagggctgcatgttgttgttgttgagcaggtgggcctgcgggtggtttggcggcaccatcccgagcacggcaacggcgagtgcaggagcttcacgggacgtagacggagacggggcgactcagagacaggaggtgccagtggggaaggagagggtggcaggctgcggggctgcgacgaacggcagcaggttcggtcagccgtcgtgcagactttgaggcgtcacacgataatgcgacggagggaagagccctttatttgcccagcgagcgacctgcgagaccctcccctctttgacgaggtggtcctggcgggcacaggccgtccgagaggaggggagccgttgccgtcatcgcccccttcaagcgagctcccgttgctcctccttccagagcctctcagcatctgcgtctgacgagcacgcacctaaagctctcttctcttcctctctctgcttgacgggtgctcaggggtgtgaaggagggcgtgaggggtcgttcggctgatggcttgaggggtcgtctgggcaagggggcggcggcttcgggcggccgcgccggctgcatcgcaggcttcctgtcatcctgcatcgggcggctagcgctggagatgatccacgactctgcacgcccttgtacgacaacaacgactgttagccgatggcttagagctaacgctctatgtctgcggtcgggttcgggcagcctttgcagaaacggcggtcgtcggacaggcgggcggtgagggcgagggcgataactgcttctgctgctgctgctgctgctgctgctgctgcgcggacgccctccgagcagccacgctcagcccattgccatgtcgtcccctgcccctatccttcgtaagactgactgtgctcaacggaagtcatattggcagttaatgaaccacctgttccatcagcggctttgagcgagataagacggtgaggcgagcagcgcaagatgagcaatgccctgccgccgccaacaccaggccgcacgaatcgagcgtcgtgcctcctctgttcccttagccgcaacccacgacccgcttcacctccgcttggtctctgctccgtgctctgtcgacgcttcggatagagctctcatcgtcgccgctgcccttgccaccagcgacaccgaccgcagagtcgctcggcagctcgggtcgccaccttccagcccacgccccgccgccgccgtaccgacctcgtcgctcaacaggatggccgccccgccatcggcggtgccggaccctcagacgatcgccggcatcctggccgaggtcagggaggcggccaagtcggcctgcccgccggccagcttccgggcgatgcaaggcgcactcctcgcttggacggtcgatggctgtgagccggacggctggcactggttctgcaggcgagtcctgccttccctcctctcttctggccgtcggcaggacctgtcgcttcggagaagagcttaatgccgccggacgggctcatcagagcctcccttcttcgatcatgacctgaggctgacgagcagagctgtcgctgcccttcctcgaccgccacccgtcgcgtcgtctgctcggcttgctcatttaacctagcgcgccgcatacgccctcgccgaccgcgttcttcgcctcggttgagacggcgccgttcgtcccatcgctggcgacctttctgctcacgcttttcgcctacaacgtcaacccgtcgatagctcgcttcagggcgtcgctcgcggccctcctcggccgctgtccggcctgcgtccggggctacgtcgaggccaaacgcgcgctcgagaaccagtacctccgcgaccagagcgccgaccgcgtcgccaactttatgcggacgctcactcagtgggagacgactctgctaggcgaagacttggcgacgacgcgctggatcgacgtccggccgacgatccgtctcctcgtcgcgcttgactcgaagctggccgggcacgcagacgtgagccgcgttatcgcctctgagctcgccgcacagaccgcctcgggatctctgccaccggctcctgtcgtcggagcaggaatcgactacggcagcctgcccgtctttggagagggcctcttgccgctcctgctgcccgtcccgcccttgtcaggaactgctgcgcctgacgccgtcatcagctttgcccggacgctcctccctgcgcgtggcatcatcgcagcgggagccagtctcgtcaacagcctgcccgcgctcgagcggctcctctcgctcgccacctctccacggacggccgcctctacaccagccgagcgcgacgtctggcgggcgctgcacgactttctcgcccgcctggcgccctcggcgctcgacgcgcttctgaccggtggcgacggctcgctcaagatcgaccgcaatgagcgctggcttgatgagcactgcgcaggcggcaccggagaaggctgggccggcctcgtcggcacgctctgttcgaaactcggcctctcctcggcaacaaccgcggaagtcgctttccagacaccagactcggccgacgagggctggcacgagaaccttcgctgcttcgcgatcgtccttcgccaggcccagtcggctttgtggctgccgccaaagaatggctggctgaccgtcatgcgcggccgacgagcgcccgacccgctcggcgtcctcgactcaatcacagggagccacgcgctcctgacgcggctctcgtcccagccggcgccgtcaatggccgagatcagcgttccgctctcggtctttctcccgctcatccggtcgctcctcaagccgatgcctgcgcctccggctaagccgggcccattcgactcgaagagcaagggcaaggagtcagagaatatcgtcctcgaacccgaaatcccgatcgacgtgcccgagccgctcgatccgctcgtcggggccgaggccgtcaagaaggctgtctggtttctgtgcgaaaatctgcagcacccgcgtttcggggtcgaggtccggacggctgccatgatggagggcatcaaggtcggtctggcttatgacacaagatcgttcttgcgacgaacgctgactacttccccaccccggcctgcaggtcctcgaaaaagcccaggaggtcctcaagacgtacccggccgaccacgctgcgcgccgggcgtgcgactcgctgctcgacatccactcggcgacgctctcgaccctcgcttgcggcatccgcgagtaccgtgaggccgtctgggcgccctgccgccagcgcgcgcgcaatgtcgtcagcgaggcgctcaacgccgactcggccgcgctctatgcgagtctgatgcggctcgccaagattattgtcgctcgtgactcgcgcaagctccgcgagaacggcctgccgctgatgccgctgccggtccgcatccggacgagtctctggaccaaggtttacgacgccattgtcgccagcgatctcgagggaacggcgatgctcgtccttgccgtgacgaaagtagcccatctcgacgtcctgccgaccggcaacgaggcttcgaaggcctgggcgttcaaccggctggaacacaccgagcagcggcgcgagtcgcgcaaaacggccgaagacttcaacgccgcgctcggcgccatcaagggcgaccgttttgccgggatgctcgagcgctttgccaacggcaacgcctcggcccggctcgcggcgctctggaacatgcccggcctaacggcggcggcgaccgtcctctttctctcgccgctcgaggacatccacaacgcggtccagacgctcgtccaagagacgtttgacgacgtcaatgaccgggccgactgcttccgcgcgctcttgacatcgatgcccgaggaaggcctccgcggcctcaacgactttctcacgactttcatcgactcggcatacggtctacccgaggccaacgcgatggccaaatggatggtgctctgcctgaccgacgtcgtcgacgtgctttgccgcggcgcgcgctcgctcttccgcgacggccgtttcgccgacgtcgccggcgtccggccgcagatcccgaagctctggcggttcatgagccgagcgctcgccctcctcttccgctacacgccgcactgggccgagcactttgacgcccaggcgatgaccgagtggatgcgcgacgcgctcatctttgcccgggcgatggtcgagcagacgcggacgttcgagggcgcggccgtagatgacctgcgagcgctcaccggtgaggcttggcaagccgagcgccagccgtcgccggccaagcttggcaaggtcggcaagctcatggtcgaggcgctcaaggacgtcctgtcggagcttcttgcctggctccggctcacagagttcgttccgcatcctttcggctgccctaacggctccgcgttgacccgctcccttttgccgcccgcagccaggagattctgcaccaggcgtttgagctcatcaagctcctgcttgaccgcttccaccgggccgacgtcgcgcccggcgagggcgtccagtcgagcgacaaggacgacccgctcgtcaaactgccaaagtttatccagcgccggaccggctaccgctgcaagcttggcgacagcgagatggccgagctctccgagatgctggcttggtgggaaaagtatgacgacgacacgatcgactacgccggcgaggacctctcgtacgccggcgagaagcgctcgacccggccggtgccctcgggctcgtcgtcgcgtgcgccaagcgacgacgagtttgacgacgacgtcgtggaactcaccgacaaggatatgcagaacatcgacgccatcagccgcaaggccgttgtcggtggctcctcgccggcactcaagctgaagcagacgacgctcaagccggtcgccctcccgcgcggcaagtcgaccggcctcgtcttcagcaagccgccggcggcgcccgtggcctcgtcgagctcaagccggatgtcatttggctcgaccaaggcctcggtgaagtcgaagccgttgggccccaaaacgcaggcgatgaagaacctccggtccgagttccggtcgacggttgcaccgcccaagggcggactcaaggccggcttccggctcggcgggcgcgtcgcctccgaagtagagcctccgcggcgcaatcgctggcaggacacgggatcgtctggcccatcggacgccggctcgtcgagcgacgaggagagcgagtcgcgtggcctcgctgggctcgctcaggcggccaaggccaagccgaccgagccggcgcgcaagacggcggcgcccgtccggcggacaatcaagctggccggcgacgacgtcctgatccggaacccgcagcaggtccggcgcgaccagcgcgaggccgcccggcggaccaagctccggctcaagcccgacatggaggagcttcaccgccaaatcctccgctgggacccgcgcgcgaccggcgacaagccgcccgaagcagcaagcatgcgcttccggccgctgcccgacctctttgcctcgccgcaagagtacgtcgacgttcttcagccgctcttcatgctcgagagctgggcccagctccagaaggggctcgaggacagccagaacgagatgcgcgtcacctttgacgtcctcggcaagtcggtcgtggacgactgggtcgacgtcgaggtcgtcgtcccctcgggccagatcgaccagcgctatcggctgagcgaggtcgacgtcgtcctcgtcagcggtctcagcccgggaactcaggcgactacgtcctatgcccgcgtcaccgtcttcaaaaagacgtttcaggacgtccagatcacgctccgcttccacaactcgaccaacctgacgggctttgcgccgcggtcaaagtggaagctccagaagattctcaagtacgtctgtctgagcgagtcaagcgtccggcgtggcaggccctgacctttatcctccctcacagtctgagcacgatgcaccgcgagtgggcgagtctcaagggcatgccgtactatgactcgatcctttcggccgtcctccgaggccagtcgcacccaatcgttgaggcttcgcggcacgacgtccgcgacacgatggacgcctatgccgtcaacgagccccaggcccgggcgatcctcggcgccatgagccccaacgcctctggctttgtcctcatccaagggttcgtcctctcgccgcaagcgattgttattgctctctcctcttgacgtctagtgctgacggttcaatctgccgccctctgtagtccgcccggaaccggaaagacaaagacgatcggcggcctcgtcggcaagtttctttctcaccgaccatccccggccgtcaatttccagacgaatcgcgacggcacgatggcggcggccaacggtgccggccctcagcaggcgacggcagccaaactgctcgtgtgcgcgccctcgaatgcggccatcgacgaggtctgccggcggctcaaggagggcctgcgctcggccagcggcaagatgatcttcccgaaagttgtccggatgggccacgaggactcgatgaacatcgccgtcaaggacgtctcgctcgacgagctcatcgaccagaagctcaaggacctgccctcgcagaagaagggcgagggcgcggccgaggtcgccagcatccgtcaagagctcgacgcccttcagctctccaagaatgagctgctggaaaagctccgggcggtcgccgacgacccgggcgagacgcggctcgtcgaggaggagctccggcggatcggctcgaagcggagcacgctcgcccagaagctcaataaggccaaggaccaacagcgcgacagctcgcgtgcgctcgacgccgcccgacgcaaggcccgctacgaggtcatcgccgaggccgacgtcatctgcagcacgctctcgggcgcaggacacgacctcctgagcgactgcgacttcgagactgtcatcatcgacgaggcggcccaggcggtcgagctgagcgcgctcatcccgctcaagtacaactgcaagcgctgcatcatggtcggcggtccgtggctccctttggtcgccttgctttgcagtcagctgactccgtcggcgcccttttgcccttgcagaccccaaccagctgcctccgaccgtcatctctcgcaaggccgaggactaccgttactccgagtcgatgttcgtccgcgtccagcgccaggcgccgcgcaacgtgcaccttttgaggttagtcgcttctcctgttttgagcacagctgccttcctgacattccctccccttgtattcctgcccccgccagcattcagtaccgcatgcacccggacatcagcatcctcccgagccgcgtcttctacaatggcaagctcgccgacggacccggcatggccgaaaagacggtccagccgtggcacgcgtcgccggcctttgcgccttaccgcttcttcaacgtcgacgccggacgcgagtcggccgggaacatcggccactcgctcaagaacacggccgaggcccaggcggcgctcgccatctacatcaacctcaagcagcagtacccgcagaccgactttgacttccggatcggcatcgtcacgatgtacaaggagcagaagcgcgagctcatccgcgtcttttcctcgcgctacggccgcaacattacctcgaccgtcgacttcaacacggtcgacggcttccagggccaagagaaggacatcatcatcctttcgtgcgtccgggcgggcggtcccgcggccggcgtcggcttccttaaggactcgcgccggatgaacgtcgccctcacccgcgcaaagtcgtcgctcttcatcctcggccacgccccgacgctcgagggcggcggaccgcagtggaacggcatcgtcgtcgacgcccgccagcgcgactcgctcttcaacgtgagggcccggttcttctctcacacgcaatgctggccgcctgctgaccactccctcttccacttgcagtactcgagccagatcttcaacgcaccgccgcgcatcatggcgacgaccgccggaccgcatagcatgcacgacgtcgttcaaggcaacccgtacctcaagcggccaatcccggccgggccctcgagctcggtcgtcccagcaaagcggccggcgaacggcggttcaaccggcggctccagccttccggccaaggtcgcccgtctcggcgacccgatcgctgacctgcgtaagatgatggtggacgacgacgacccgtacccgaaccggggagcgccctcgccctcgccgcccccgccggagccgaagaaggaggccccgcctctgccgccgccagcgaaaggcccgactctgccaccgctgacagcggtcaaaaagtcggccttcctgtcaaagccgccgccgaccgacctccgtaagctcggctcgagctcctccacaaagcgaccggcggcggcggcagcaagcagcatcaagcttgagccgtctcgctcgaccaaggccgcgtccagcaacggcggacttcgaccgcctccgaaggcaggcacttcaagtgccgactcggggtcctccaacggagtcgccccggcttcggcggttcagcacctcctcaagaagcccggccctccgaagttaaccctggccaagcggccggcgcccaagcaggacagcctttttatgccgacaaagcgcacggtgcgcggcgttgagcgctctcttccattgtctctgcgactgacgctcgtcccttctctctgcaggcccctgcgccaggcacaagctctgccaacggagggccgtcaaccaagccagccggcctgccgatgagcgcgcgcgaacggctcaacgcctcggccaagattgagtcggacccgacggccctctcggccgtctctcggcgaccgtctggatcggcggcgcccccaactcggcgctagcggagggcgggcgtttgcctgcatctccccccttcagatgctctcgcggcgtcgcctgtcatcgcccccttcatcttgcctgctccaaaggtctctttcttccacccttcccacccactgtaccacctaccgcactccttttctctcactcgtcgcgcaactgcaccctcttcctccacccgtcacgacttgcatacgacggggggctatacctgtcgtcgcctccgcatggttactcctttcatcttccgcagcgtgagaacctgctgggacgacggcctaaaggccgggccgaggcggcttcagccgaggtcggccccgcttccgacgccggactctggcctccctctgagcctgctgcctgccgtcgtgaaccatctcactcaatctctggtctacaaccatccacctgatcctcatgtcgtcccctaacccactcagcgagacagcccagtcggccgtcctcgagtcaatcgacgacgcgagcaagtcggtccagcagctcttcagcctcgagggtacgcctcgatctcccgcccgagcagctggagattgctctccctgaccttcccttgcttcactcaggcaagttcgccgtcgtcaccggcggcgcccgcggcctcggcctcaccatcgctggcggcctgctcgaagcgtgcgtcgcagcagcagcttgccctcggcgatggcaccgtcagctgacctgctcgccctctcaataaccagcggcgcccacgtcgcactgatcgacattctcgagggcgtcgacgacgtcgagtacgcccccgtcaagcggctcgccgacagcaagagcctgtccctgacgtaccgtgcgtgcggagctcgaacgggagctcgtacgtagtccgtaactgacgctgttcgatcgcctcggctcgcgcagaccggtcgaacatcgccaaccaggaggtgatcactcaaacattcatcgagatcaaggacgttgcaaaggccaagggcatgaccataggcgtcgtcttcaactgcgccggcgtgcagcagcggatgtcggcctacgactacccgcaggccgacttccagcggatcagtcagtcgtgactggtgctgtcgtcagctcgtaggccatcgctgaactctgttgatcctcggccgcagtgaatatcaacgtggtcgggtcacagctcgtggcccagcaggctgcgctcgcgatgcgcgaggccggcaggggtggttcgatcgtcctcatcgcgtcgtgcttccctcaacctgtccgctcgccgctcgagactcgaggctgacgtgtggcttctctctaggatgagcggcaccatcacgaaccgcgggatgcacacggctgcttacaatgcctcaaagtcggccgtcctccagctcgctcgctcgctcgccgtcgagtttggacccaacaagatcagggtgaattcgctctcgcctggctacattttgacgcagatgacggccgacctactcgagacggacccggcactcgccaagcagtggacgaacgacaatccgctctcacgactctcgaagccgtgggagttcaagggaccggctgtcttcctcgcctcggacgcgtcgtccttcatgacaggatcggacctgttggtcgatggtggtcatacgcgagtcctaatcagaccgatattttcaccttgcgcctcttcgctgactcctgatccatccttatcaacagcgcctggtgattcaccgcctctggcgacccacccttcaccctggcccctgcttcttgtacctttctgttgtgccgcatcccatgcccatccctgcaatctatgccgagagagagagcccgagaaccgaccgacgctacgaagtcaggtgaaatggctagaggagtgttggtgagtgagggaggggagggagcacatagcgacctgcccgccaaacctctgtacccactagagcatctctccaccctcgggcctagtgcccaactgtcttctacttacattcctggctaccaatataagattgccaccttctccctgctctctcgtcctttgcagaccgcacgaccttgagcctgtctgtttctcatcttctcatcttcactgcctcgtttccaatcgttgatgaggctttcgtcctgcgccttccctcaccgggagagcctgaaccgagcgaggatgcgcaacggagcatcgatctcgctctcttcctccccgccccagtgaccgagttgaacctgcagctaaagttcagggtggctatgaagctgcttgcgctgatgagcgataggtcttgacagacagaatgagccaagtcaacgaccccgaggcttgtcgaactcgcgctggcccttttggccagcggtagatgcaagagagcacaactggagactgtattcagaaccatccatcgatcagacgagacgcattacgttgacatttgaccgaccggtgccgatgttgaggtcggcgccccgaccttcggcaaccttgcccttctgctggttgatgaaggtcgtccgctccttcgcgaacaggttttgggttgacttcttctgcactcgccgggcctgcagtgacaaaaaggagaccaaaatcagtactcccccttcagcgcgttcgacgagatctgaagacgtaccgcacgctcatccttaaccgccgacttgcgcgccttcttctcctcggcgctctcacccttcttgcgggcgatcgtcacccgcggcttgtcctcatcctcctcggcctcctcgtccgactcggcaatctcgctctgctggtccatcgcgagccgggcggcggccgccttagccttgcggcccgagagcatgggcatgccggttgtcgggtccaacctcggcttgcggccgtcgagcagcttggggtggttctcgagtgttgagtacgtgcctggcgccagcagaaagcaaaaggagaccgtcagcgatcggtcgaccaatttcaagacagggagcacgagaagacgcactgatgatggtctcgcagtcccactcggcccgaccctcgccgatgatgtgctgcttcgggagcttctcgtcatcgctctcctcgtcccaaccctcggcctcgcgttcgcggtgctcctggaggatccggtcgcggtcaaagccctcgttctcgtcctccatcatcgccccgcggaacgtcgcgagcttctcggccgccgtcgttccgggcaggatcggcttgagcttgttgccgaggacctcaaagttgtcgaggaagtcgtcgagaaggccgtcaaagtcctcgcggctgacgagatctggcgcgattaggtcgccgtcagagtcgtactcggcgtctgacgggtcgtcgtcattcgagtctgagtcctcctcgtagagcttctcaatctgcggcagaggggcgaatgtcagcctcagttgcagagagcggtcgaagcgcgggtcggacgaacctgatcgaactgctcgtcgagcgtacttaggcccttgttgcggaacatggagctcgagctcatcgagtagccactagcgtcggtccgtgcgcgacgcttggcgccgacgaccatgctgcccttgccggtcgcgccaaagccgccgagcgagccgagctcgtcggccatctcggttccgtagagctcggccgagccgtcgtcggtcccaaagtcgtcgtcgtcctcctcgccggcgccgtgcctccggtcgagcggcgaggcagaggccgccgccgtcttcttggccgcctcggccagcttgaactgcttgaagcggtcctcccaggtctcttcgccctttgcgagcgtctcgcccttgcgctcctgctcaaggccccactcgtggaactcaaactcttcgcgctcctcgtcctcggcaggcgggccttcgagcagaagctcctcaagccagtccgcgtcgccctcgcccccgccgtcgaggtcctcctcgccatcactctcggccgagtcaggcacggccgcgaggaaggcgtcgtcgtcgagcgcctcgaggacctgccgcaggtgggggtccatgtcgggctggagaccctggagctcgagcgggatgttggacccgccggcctgagcctcggccatcgagagctcgaacgtcgacggcagggcctcggacggcaaggctgccggtgctgacggcttgttgaacatgtcggcaacagcgtccttcttgcctgccttgcccgactgcgccagttttggcgcggcagctggggctgcaatcaagacgccctcgacgtcgccctcgcccgacggcaggccgacctgccgcaggtgctgcatatagtcgtactccgagtcgtcgaacaggatgccccactgcgaggcctcgcctcggcggcgctcggcaccggcctcgctcccggcgtcgtccggagcagctcggcccttgccctgcgggcgcgcaagaggtggaggacgttcggtgtcagcaccacagcttcgacggctgctcccaagagcagctagagagacgttcgcaagagcgcgcaccttgtggacctggccaacgtcgacctgcttgaggacgcgggcagacgcctccgggtcattgatgagcgggtcgcgctgcgagcggtggacgagctggaagtgctgggcgccgggccggcggtagattgaggtcggagccatgctgggcgggctgctgtgctgttcgcggcgctagactctctcttctaaggaagaaatctgtcgacgggaaagagtaggtcgtgcgagtttacaggtcgtggtcgttggtacaggcagcggtcgccgccggctcgacggccagaacgaaactgcgcctgcgcgcgccaaattctgccctccacccgccgcgactggcctcgagtgcataatgaagagtcgcatcgtcaaaagagaagaaagagagaaggtcgtgcagaaggtcgtaaagagcaggagtcgggcggctcctcattcagcgtttcatcatcatgtcgaaactagcagagagaaggcgggcgcagagggtcagaggcgagcggaagaggccacacagaggacgacgtacgggttggtcttcttgcccgccgccttcgaggtcttgctaggggcgcccttgatccgcttcggcggcggcatagcaggggccggaggttcggcccggaccttcttgcgcggggggccgttggtgtgcgaggccggcgctacgccagctggacgtgaaggcccactagtgggcttacgcgctgtgcgcgcaggagggctcgaggagcgcgaggcctggttgatcgcctcctggttgatgcagaggtcgatgtggtcgttgacgaaggcgaggtccgaggccggcaggggcatctatgcgagcgagagcggggtcagcgacagtgtcaaatgactgggcgtcgagcacagggcgtacctcgcagatcgggcagacgagcgccactttgtcgtcgtccggcgtgtcgcccttatgtcgatcctccttctcggcgctgggcgacccgccaggggtctcggagtctctcgtcggcgaagggaggaagctgatgccgttgtcgtcgccttcgtcatcgtccgagtcgaggagagagatgacctcgccttcagcaaagctcgcgcgctgcttgcccttggtcggtgagcgggtaacaaactacgatggtcaggcagtcagtgcagtgaacaagcgagccagtcatgatgaagggcgactgacgccgtcgagcgcgcctttcggcttcagctggggcacgactggcgcgcggaggtcttggaggtgcgtgacacggaggccgatcaggcggacgcgcatcggcatgttttcgtcgagcagctggagggcgacctgcatgaggctctgagcagtgcgatcgggcggagagtgagtcagcagatgaggatgcgggtcgcgacaggggcggccggatgcacctccttggacttatacgcgcctgacttgatcgtccgatcgcgggtgtagactgagataaaggaggagatcgtcggtcaggttggccgcgccagtcatctgaacatctggcgaggacggacggtagtagtcgtgcgtcttgaacttgaggctgaggcatctggccgcaaagccgagctgttccatgtcctcggcgaggttggtcgcaatctcctcgagcatctcgacgaggtcctcacgcttccacttgtcgccaaacgtccgctcgacgccgatcgacttgcggtcctcgcgcttgccagcctggcggatgttggacgtcgtgccagtcgccgcccgcaggaggtctttgacgccgtagtgcagcatgtgcagagttgctcggtgcgtgaagatgtcgccgcaggtctgccattgggatccagacgcaagggtgttagattcgtagaggggcaggcgggtagaagcagagccacccaccatgacgccgagagcctcgaggcaccgctccgagaccttgccaatgccaggcaccttgcgaatcgtcaaaggacgggtgaagtcgaggacggcatcgcgctcgaagggtaccatgaactggccgtcgggcttgttcatgtcggaaccgatcttggccagcatctgcaagcagcggcctcgtcagcgtgtagagagcggcccgggtttcgctgtaagggcgcaccttggtcgggccgatgccggcgctgacggtcagacccgtctctgccttaaccgtctcgcggatcttgcgcacgacagcctcccgacgctggccccactcctcgacgctgacgaagcgctcgccgtcggcctcggccgggtactgctcgagcagatggtcggtcaggtcgaggaaggcctcgtccatgccgaccttggcgatgccggggtcaaagcgcttgagaatgctcatgactgcgattgtggtcagcgtcgcgctgtatgataggaggtcagtaaaggctagcttcgacgcactcttgcgggagtagtccgagtacgacgagaagttggccttgacaaacttgagatgcgggcagagcttctgcgcgacgaagcctgcgcaggacgccagaccagcaagcgttagctgcagtccctcggctcagcagccgcaaaaaaagcaaaaagacgcaccggccatgcccgaccggacaccaaacttgcgcgcctcgtatgaggcggtcgtcagcacgccgccgccgacgccgaacgcgacgcccttaagcgtcgggtcggccagctcctcgcagttggcgctgtcggtaggcggaagatcgagtcaatctagtgagcgcaagcctttggaaagacgcggcaaggggtacagggcagcaacgcactagaaggcgtcggcgtcgatgtgaacaagcgtacgcgtgaggtcgcggcgcagctcgagcttggcaatctgaggcaaccaggggtcgactggtcaactcctctcagcaatgagcactatgaccatggcaaggagagtcacgatgtcatcgcactcggcctcgagtgccgaaatgtcggcgagcggcaggagctcgtccctctggaagaacaggagcgcagggtccgcctatcagccgcgacgcgacctgtgacagctgccggccagcgacgcacccgcttaagcagccgatcaattttcttgcctagctcgaggtcctgaagttggagatcccaagaaatcagctcgtgtgcgagaacggcagcctctcctgacagaccttctcgtgctcgcgctggtagaacttggtcccctttgaggcctcgtagatcgtccgattgacgctcgcctggttcttgttgagcccggccttattgactgactggccggcgagccggcggaggaacgtgtcggtcgcctgagaagctggcggagcagccgcaagccgggaaggctgaaggaaaggacgagaggcgaggcatgtcagctcaacaggtggtccgggcgaggccgaggtcggcttggcggaacgcacgccagcttccggctgatcttgctcctgctcggcagccgtgtttgagcctgggctgaaagggttcaacatcggccgactcagggcgagaccatgtgcgcaaaaggagacgaggacgtggttgacgacgacgggcggcctgcgcgagtcgttgggacgtgacgggacgacaggcgggcgtgactgccagccgttcgtacgcccggtcggcactcatcctcatcttgcgctcaagaagacgagattggcagacgcatcatgacgccctgctgactactgtcgtgacacgtcgttcatggcatagggtgctctatcgaagcacggcggcttctcgtcgtcccagagccgcgatcctcactgcgcgttccggatcaggagccggacggtcgacaggaggacgccgacgagctgctcgaagcagttgttctcctcccgctcggccgcggccgcctcggctagcatgaggtcagtgttgacaatctcgacatcgagctcgtgtcgccgcttgtcgccttgtgccgtctgttgcagggtcgtcagggctaagagagtcaatgactcactctcgtcgcagcccttccttagcaggattggcttacggcggtgatcacctgcgtgagatcaatctggacaacctggtgctggtacgacaggcggtccttcttccgcatgttaagatcgggcccgtccggcatggtcggtactgcgaagacgacagagtcagccaagcgtctcgcacaggcagacacactctttccgcactcacatggcttctcggtgctgatgctcagtcgccagtcaaacttgctcatcggacagaacacgttgaggtcgccgagccggaccttctcgcacacctggatgacagcctgcgtcttctggtccttgcggatccggacttttttggtcccggctttgcggaagatgtcgtcctcgaaggcgtgcgcgtactggatcggaagtggcgacaggcgcgtctcctggacctcgaagttgaggagccggttgaagtgcttgtgctgggcctgcgcggacagcgagccagggtcagctggtgcgtcatgagctgcagaggtcggcttcaagcgcgtacgcacggctggcatgtcgctgtcaaagacgtagcgcaggccgatgggatcctgcgggccggcagacgggcggaggactgacaggcggcgcgtgcgcaggcaaaggtcgtcagcttgccggccatttgacaccgagcagctcaagagcgcgacgtactggcttccgtctcgaacggcatcgcctgcaatcggcgctggttctccggatgcttgatctggccaatcttggcttcaacctgtgccgacgaaagagatgagaggggagaggagataggggtcagccgacgcgcctgtcgttgagctggccatcacgcttgaaggcccggctgcagccggccggcacgccttgacggacatgaatgtgctggtggcccttggacatggcccagatccagttgcctatccgcttctgcatctcgtcgtaaggctcgacccggaagaacgacggcaggagcgcgttgggctgatagccgaaggcgtcggcaccgtagccgttctcaccggcatacgaggtcgaggcgacgggctgggcaggcggcgtagacgccctccgtcgcttctgctttggagcagatggcgggataggcagcgagccctcttgaggctcggccttgacgaggcggccgttgacgacaggagttaaggcggctgcggttgccgtcgaggtcgaggcggccggcatgggcagtcgagcagcacgagccgagaggttcgcgcgaaagggagacagagtgggtgggagcagctagtgacctcgagctgtcgagctgttgatccactgcgtgagaaggtgcagaggagaggtcgagagggtcgtcgtagttggcagggtcgtcgagacgaggttcgacacgcgcgaagttcggctgcggggacgtcgactgtcgaagtacagcacgtcgagtgtgcacttggtcacgacccgtctttggacaagaagcgctcgacacgtaataaacagatgcgctcgtatagatagaaagcagcttccggactgttgtacgagttcgatcgcgcatcgcccgcatctcgccgttccaagcaccgcttcgtccgcaaggggttcgactacatcccagccgtctcgcctgcagccctcaggcctccggcatatgctcgaggactctaccgacgccgccctcgccctcctcgacccagacctcgggaaggccgtggaccggtgccgcgtccgtcaaaatgcacgtccagcgcgcaatctcagtcttcgactcgttccgccaggcatggacggtcccgcgctggacgacgctgggattaggccggcactcgaggtcagcgactgaggagaagctgaaggcagcacgacacgcacacctcgccgacattgacgaccgtctcgagaatgtcggggtgcgacgactggagcgctgacggcggccagtcggccggtaccgtcggaacccgcggagtcagaagcttgacctggccgtgcgtgacaatattgtagtcgagcgaggacctgcaaggagggaagggatcagcaagtagtcggtcggcgagtctctacgcaggcctgcgctcctcggtcggacgtacgtgcggtgctgcaaggcgacggccggctgaagcgtcagcgccgcgtaggatgacccggacatctagagggcacgcacccatgcagtagcttggcctggcatgagcgtcgccgtcctgcagtttgacccgcctcgccggacgatggctgcatcgacagggacgagagcccggtcctcgctgcgagacggcgaaaggcagcagagcgtcagcttcgcgtccaggcaataaactggcggcctttccagccgagcagaccgactgctttgactcgtctgctggcgtgctcccgtgccagatctggccgcctgtcttagcggcctggtcgtcgtcgaagatgatggcgacggccggctcgagcgtcttgctgttgccggctgctgagctgctgccggcgtcggatggcaagggcgcgtgggccgtgacaatgcgccggtgcgctggaactgaaacagaggaggacatgagggtgataggtgaaggtgcgaggacgattggcgaggtcgagagagctgttggctgtttcgggcaactcggggcgactgtcgggccgaacggttcggcggtcgccgacgttgagcagctcgtgaagctgctgctgctgctgctcccgacggccaagctgacgacaccctcttatgcagctgacagcccgactggcttccggacggcagtctttgcttacaattagctcagctcaaggccaggtcggcttcttcctacagccgtcgacggtcaaaggccgcccggccaccggttcgtctcgcagcttcatcctgtcgtgctgatgggcagcggctgctgacgacttataccgttccattcatccttgcaatcaaagcgatcgtagggccaagatgtctgtcaggagcatctttgccactattcagtagcctgctccattgcgtcacgattcgtccgagggacctggcgggctcaacgctggcttcgtcgatctcctttcctgaccgtagcccggtcagacgacgctgatgccattctcgatctctatgacgggacggcttccatccgcagagacatcaaggccgacctcctcctccagcttcccctgttttgtccagatcttcggtcgaggcacgcagatgtaggccgtcggtcgtcgacggtcgcccgtcgagaacgctcttgctgatgcttgactcagcgtccccgatgcaaggctagcttgatctcattctcctactcaagaaggaagagctggcaacctgtgtcgcccttcgagcggcgatgacgcaggctgagcaccggccgtcacggcccttggcgcaccggccgcacgtcccgccatggcgctatgagggcagcaagaagacagttggaccaggtctttgttttgcaccatagcgctggttggcctccaaaagcaaacgcgtcgcccttcttctgcctcgcttgctgatctgagacgggctttgtgatgccgggagggcgttcgcatgacgccttccttcctgcacctcgcccccttttgtcttacgccgactgacgcgatcgcttcgtgaggaactcatgatacaacaacacggaaggtcatctctggcaaggagagccgagtgggatagggcagtaagaccggcgattacaagaaccaagcgcacgactggctgcggcagcaggagaggggcgtcagaagtgcgcaagcggggaggggagcgaatgagcagcgactgaccccagcgaccaggcctcggctgccgagcacgagaagccgccgccaaagacctccccgcccaggaccgatcggaagttcatgcggagctcaacctcgtccggccggagccgccagcgccactcggtgtgctcgctgacgagaatgaggtcctggacagccgtctggttagcgaaggcgcggacggctggcatcatcgacggtaggtgcgacttgaagagggtcagcgcggccgcctcgagccaagggtcgggttgcgagcgcgaaaccggcgactcgtggaggtactgctggaatgtcggagcgatgtcgggggtcggcaggagcgggcagggcagctcgatcgtcttcaggtgcttgaggttagacaggtaggagggtacgtcggcctgaaataagaaaagtaggatgggacgcgtcagctgcaggcggcgacgagcttcatcaggagggatgtcgacgcaccagcgcgaggtcctcgtccgcccagtcgctgccctcaaagctaagatagcgcagtccacgcatcttggcgttcaccgtctcgagcaggtgtcggctgacgccgccccaggtcgtgaacgactcaacgccggcgccgtcggcttcgctctcgaacattgtgtcaagcggggcgtcctcgctcaggacgagcgtcttgagtagccgcttgcccttgacgaggttgcggaggccttctcgatcgcagagggagggcgacgacgtgaggttgacgttgagctcgacgagcttggacagggcggcgatggggacggcaaagtgggatgagggcgaggcggcggcgtgggtgatccagagtgactcgagatccggagagccgaggagaagagaggggaagaagtcggacgacaggtctgacgtccgaaggaagagctggcggaggtgagggaggaggagcgtcgtcgtcgaactggtccgtgttgccacgcagtgactgccaccgcagacattcgccgatccggctgccgccggtagctcaaagatacgacgcgcctcgtcgccgtcgcgcttgtagccgaaggcgatgtaaagctgctcgagcgtgtctgttgaccggacgagcaccgactgaatcgcgtccagatcaaaggaacggcgggtcaggtcccaagtgtcgtccgaggcgggcggagcggcctggggtgggctgcggggggagacgccgagttgctctgggaaaaggacgagcgagcgtaggtcgtggaaggctgcgagcgctggtctgtgggggtgggcggtcgttgtcagcgctgaacgtgctcagagacgtcaggcaacgcacgatgaggagaagccagtgcccgagacaaagacgctgttgagcgtctcgagccgcgcaaactcgcgcgcgagaccgagcgtgagcggccgcttgctccgatactggagctgctcgagctggatcatgtgcgggacgaggctctggaaggtcttggaggggcagcggcaccccttgcgaagacaacgagagcagtgggcatcagcgacgcgatctcgcaggacagatgcagctcgaatatcgcgcaccgagagacccttggaaccaaccgtcaggtggcggacgtgtggcaagaggtcctcgcgaccagcgagccaggccatgcgatcgtcgtcgacggcgcagttgtcgatgcgcagggtgtggaagcgcataggtctgcgacatgcgggccatcgcgtcagctggcggccacaaagagtgtcgcgctcagcatgaggacgaaccgagtgacaaaggccagcatgctgcacgtctcgccgagccggaagacgtcggcatcgggttgggcctgctgcggaagagagaagcgctggcgacgggtgtgggcaagctggggggagccgcagaagaaggcgatctggtcgaggacctgaagcaaacgggacagccaaggttagcgacgcccacctctgatgagacagctgctggacgacctacgcacgacataaggcagggtctggaagcgcagctgcgtgtcgacaagggctccaggagaaggagttgctgctggtgctgccaccgaggcattgagagcgagaccgtcgggcgacattgcggggggaagtcgtcgaggtcgaggtagaggtcaagaggagaccaggtagatctcgcaggccaagaaaagaccgcatggtgggcggtcgtgcgaggggggatcgcatcatctccagtcacggccgtgagcgagtcccaggcagtcgaggtcggtcatctgcggtcgtcgggtcgcggcaagaagatcgcagtcgcctgcacgcgagtgcagcgcagcgggcagtcgcacatcagtctgctcttcatggcggagcgctaggggagtgagtcagtctgcacaggtcgttggcagcgggacgaccgtggcccgagtcgagctcgacgacagccgctctggctcaccgtgagcgacgccctgaccatccgcaagacctctagctgaggagccgttaccacctgagtcgcggccgtacggccgagaggactcactgaaagtcttccccgacgagaccgagcgttgacgctgtcgctctcggcagggatctcgcggcgagagcagaccgcggtgcctgtgccgcagagcccgcccgagtaaaagcttcctgctgagcgggtcgctccgtccggatataagcggcagagagagagactcctctaactatcaaccgtgtcaagggcttaggtcgtacagtgggaggacggttgtatgggttgaagtcaaggacgggacgtcgtcgccggctgaccaggtcaccgagctcgccccccggccaagccgaccgctgaacatgagcctgccacaccatgaacactcttgtctctcttctctgccaggctggcagctggagcatccagcgagactgcagtcatgtacaccgtcacgtgacggagagtagaagggtccgaacagggtgggtcgctgcccggcgttgctggcatggcaacgtgactgcggcgcgtcgcccggccatgcggcgcgtcgatttcgtcgctcatctcacaacgtctcgccgacagcgagctcctatgcaacccccgcccgactgaacctcctcgtcccgctgccagggccaggaacctcccccccgggacgtgagcaggagtctacgaagcgcacggtaaaccagcagctgccctcacgctgtctcgccgcctgctgctgaccccggccgctctcaacgcgaagacctcgcgtcggcagcatggctgtaactgttgaaacgcacggccttgcttaaggtagcagggtacttgggtgaacgcttgagatagcaagagatgttcgcgctgcggcacgttagagggctgagcgcgaggagggagtaattctacggtggggtctggagggcacaagcggcgtggatggggggggggggggggggggaaagcgttccaagagcggtaggctgagcgtgctctgggtcgttccaagcccaggacggcacccagccgggaggacgtgcctcgacctgcagttcttcctcgccgcccgtcgtgctagttcggatgcagcatcgtcagctcgtccctcagcgcgatgggaggacgcagtgctcgggtggcgcactaatcaagcgagatcggcgcgttcggctggggcccgaacgacgcccacggcggaatgtcgctcttggccgacttctttggcggcgacgagatggaagctggcaggcgccggtcgagcgtcgcttcggtcgtcatcggcagctcgggcgacgtcgagggtcgggtgtccgagttgcgcttgaagtcgggcaagttgccaaaagttgccaccggtgacgaacgagtcaaggcgggcgcccgaagcggctcgtatgtcgacgagacaggcggctgcgaactagcggggactttacccgctggtggtggcgtgagaggctcgatctcgaggacggcctcatcgtcgcactcgtaccaaacgtcgtcgctgagcgaaagcaaagagcgagtcagtcagatctgttggcgctgtgaaaggcagaggcgagacgcacgccgagttgtagacttgggcgcagtagtgccccgagttagccgactcgcccttgtggacaagcaccgcccgaaggtcatataagagctcgacttggtcgtccacgcccgtgacgtgcggccgcatgtcgatcgacggcgggaagcggacgatgcgcttcgtcttgacgcggtcgccagcctcggcgtcatagacgaagcggagcagcgaaaggttgagtgtctgtccagcttgcaaatgttgattagcggcgaatcctgtagcagatctcgtctagcaggcaagacgcaccggtggcaggctcgtaatttcggtgtagcgcagggcgtcgcggtgcttgccgcaccgcgggcagtcgtacctggcgcggccgaaagacggcgtcagcgacggccatgactaatcttgagtgagaaaggcgcactggttgtcgccgtccatgatctcgcgctctagcagctcgccaatcaggaagtcaatatccttgcccgactggacaaacgaggcgcatcgagtcatggtcagcgcaggccgccgaaggaagacagcgcaggaccgacctgaatggtgagatcaagctcggtgaaggcactctcgcgccgactctcgtatttgcacgtccggcacttcgtgacgtactcgaggccgccaccaaactgcggcaggaccctgggtcagcagagcgacgcaacgtggcgggtagtcgaatgaggacgcacctgagcctcgacaacgttctggccctttgcatcggggagagtaggaacggctttaccgatgagatcaaggaagagtttggagaacctgatcgagcgaaggggccgacgggtcagtgcgctgcagcttcaatgcgtcgagggctcgacttactcctgcgcatcctgctgcttgccctgctcgagctggaacgtctcgacgaggcccttcggatcaaaatgactctgcttggacgcctcgagtccatggaagacggcttggagctggtagagcggagtcgactgcagcgcagcaaggcgaggagcgacatctggtcagcgcgcgagcctctcgcatcgaactttccgcggaagcaagtctgacctgcagaccggacgtgtccgtcgtcaaaagttcgagcgagtagatgatctgccgaaagtcggcattgtggaaccacgtctgaagcagcgcgttcgcatagcacgtcgctccgagctgcggaaggcgaaggacaagtcggtcagggtcagtcactcgaggggagattgaaggaagtaaggatcgtgttgatgcccacattctgaacgaaacgaggacaccattgagaagaatgtcagtcggcagtctctgacggagggtcaggcactcgtagcgagggcggagacaacgcacgcggaggccgcacggcgcgcccggctcgcgcgcgaggttcatcggattgctctctggcagagccttcttgagaaagagctcccgagccttgtctgtcgagcgacggcgcgatgcaaggcagcgagatcggaaagtgggttgctggtgggtcagcgcacgaaccgcgctcgacgcgctaggctgggcaggccgaaccgcctgctagagggcaccttctcgacccgccgccacatcctgctgtgcagacgcaccggtatcgctcgtccacttctcctgcccgaggtagcgcaggcagtttggattgccggcacacttggtgcgcgagcagtggtgcgactcggacgaggcggcgtggccattgtcgccgcccgcggcgctcgacgaggcccggccatcgtcgcggtcgtcgtccgagtctgagatctcgattggcgacgtcaacttgcccttgccactgagtgctgcttgtgagcgacttgggccggccgtcggcggtggcggtggactgagggagccatcaggctcggcggtcgagccgagcgtgaagccgctggccggtgcgaggccggcaagctggagcgcgtgctcgtacgtgaggtcggcctcggacgagacggtgtcgaggaaggccgtccgtcgggagccggccttgggctggccggccttcttgggtggcatcgctgcggggtatgagagagtgcgacgaggaagagggcaaggggctgcgatggacgacgcgaaggacgcgagggtgcgaaggcggccgtgcgcagcgcgttcgcagccagaacttatgacatgaactccagctccacttgctcggtatcctgatcaactcgccagaggtgcgctgatggtcggagaaggtcggacgatgtcgtcgaggtgcaaggacatgtttgcaacgcccggtagatccgcccgtccgccctcctgcgcctcaccggcgtctgcgggcgggttacctcccacccgacgccgccggccagtcgtccgcctcttcccgctcgccccagctctcattggatcccagcgcgccaacgaccccgcgcttctgcggctcgcgcgtcaggagccggtcgacgagcctccgcgcactctcgttgacgaggcgtgggctgccgggtgaaggaccgtccgcggcggcgagggcgacgacggccggtaggtcggctgcggacgcagaggttgatgcagaagctggtggcgagggccaggtgtagtcgcccttggcgatccggagcatgcgcgcgcgtcgcgaggcggacgactcgagcgacgggtcatcgaccggtggcgagccaaaaggcagcgcgcgcgtctgatggcaggcagtcaagtcgtcagacatcagtcgtcggcggtcgagatgtgttgagcggaatgacgtacgagcagcgcaaagaggacgacgccgcacgcccagctgtcggtcttgcggccgtcatactcgcggcccatgatgatctcgggcgcggcgtacgagtcgctcccacagcgggtcgtcagcggcggatctgccggaccgacctccttggcgaggccaaagtcggtgagctggatcaggggctcggatattagcgggaggtcggaccggccgagcgggccggatgaagttggcgggaagggccgagtgaggaggatgtctgccagaagagaaatctgaggtcagcgatgcttggaaccttgacgcaaggcagggcattaaaacgcactctcgagcttgatgtcgcggtggacgacgccggctgtatgcagataagcgacgcccgcctcgagctcccgccagacgcgcttgacccagccgcggccgatgcgctcccaccttgccgggtcctcgatgacgacaaagagctcgccgccgcgaatgagcggaaggacgacgcagtgatgggttggcgtcgtgaaggacgtcaagtgagggatgatggccggatgagacagccgctgcagattgcgcaagaggatttacgtcagcgcatgcgacagacttcgaccaaggcggagcgcgaggacgcaccttcaggatcgagacctctctcgcgaaactggtaaacgtccggtcgttctcccggcaggcctctttcgacatcatcttgacggcgacgaccccgctccccttgaccggctcgtcctgcccgtccgcgagctcacgcgcgccccagaccgagctgaacgcccctcggccgacgacggcgccctcaagccgccatcgccggcgcttccgcttgcgccgaccgtcgacctcgcggccttcgcggtcgagctcgagcttctcctcttcttcgaggatctcgcccgccgttggctcgggtaccgatgacgctcccacgcttgcgaccgtacgggcgagctgcgagtgagggaggccggcgtgctgcccaggagggctgctcgaaggaggcaggccggcgaccctgcccgagcggggcgtgaccgggcccgagacggcacgagcagcctgctgatcgcgctcgaacgcgaagtagggcttgtgcgcccatgtctcacgcatctgggcgcagctggacgctccgacgagcgggactggtcgagggcccgacgaggcgtcgctcgcgctacgcgggtggtctgcccgccgaccgccgccgctaccattactgccgctgccacctggcaggccgacgccaagccgggcgaccgtcgccgagtcgaggccggcccgaccgacactgcccgcgcgagcgagcgccttgcccggctcgagagcgcctggcggtggcggcggtgctggcggcgggactgagacgcgctgggcgaagaaggacgaggtcctggttgacgaggcgtttgatagcatcgagtcggtccgccgatgatccgacgcggacaaaggcagcgagagctgcgtcaagggcggcggaagcgtagtgaagctcgtcgacgggctcagacggaggagcgggctcgcgcccgatgctgcggcaaacgaaccacggccggaccgtgacggcggcggcgacggcagctcgttgagcgtccggaacgagtgcgaggacgagacggacccggccgaatactgcgagacgttcagcgatgtccgggccgacgggctcgggggcgcaaacgacgtcgtcggtgacatcccttgcgattgcggcgggggcagtgggctctgctggtgctcgaacgaaggcgtcgggaaatcggacggtgcgacgggcgaccagggcaggaaggtcgcgagcggcgcgggcggcgccgagcgtgagccggacggcgtcaggcccgagctcgagcgggccatgttgtgcgagtcggcgacggggcgactgctactgctgcaggcgacggcgtcgtccgcgcctgccgccggcggaggccgttgagggaggtgcagcattggctgagcctcgcgcgcgtctccgccgggctgtagatgaccgttcgagccggaagacggcgcgctggacgtggatgggatgtgcgaggcggtaaagagcagtggatgggtgtcaagggcgagcgaggcggccacgatggttggcggcggcgtgcctgcggctctccttcgggcgagccggcctcgccgacccgcagcagacgagacgcacgggtgtcgagcagggtcgatggctgtcctgtaagctggtctcttaacagcaccagcacttgccctgaagctcacacgtaatttcagtcgtccaacctacagctcgaccaggccaagcgtgacggaaggacgcctggcagcgtcgagccaggtgctgagctcgcgggcccggccggctgcgcgggcgcgcgacgcctccgactgacgcgaagctcgacccttgttcgactcaacagtcacgaccccctcctcctcgccgccctccttcgccgctcgccgtctcgcacctcaaactgccacgcaggagatgatccgctttattctcatccagaacaggtccgttcctgccgcccaggttgatctcgcgcgacttcggagtgctgatgggcgcgcctcgttgcctttcgtctcacggcccgactcctttgcaggcaaggcaagacgcggctcagcaagtggtatgtaccgtttgaggatgacgagaaggtacgtcgccttttatcttgaccgcctcggctcgtagagaggtccttaaggccgacgggcgagagctcaccagccgacccgcccgccaggtccgactacgcggtgaggtccatcgcctgatcgcaccgagggaccagaagtaccaatccaactttgtcgaggttagttgtgctactccctggggatacgaggagctttgtctgaagttgggctgtccttccagttccgcaactacaagatcgtctaccggtgcgccctgctgctcctgccggcctagtcgagctgccgagcacttgccactctggctcgcacgcatctgacgctcctcatactccctgcagacgatacgccggcctcttcttctgcatctgcgtcgattcgaacgacaacgaactcgcctacctcgaggcgatccacctctttgttgaggtcctcggtgcgcacgctcaacaggctcagccagcctgaccatcgctgacgacccgaccctccctcgtccagacgccttcttccaaaacgtctgcgagctcgacctcgtcttcaacttttacaaggtctatgcgattctcgacgagatctttctcgcgggcgagattgaggagacgagcaagacggtcgtcctcgaccggctcgactacctcgagaagctcgagtaggccaggagcgacctcggcttttccttgcccggtcgcggtgtggtgcggagacgacgctgttacgatcttgatgacctttctctttctcttcttgcggcgtgctcttacaagggacaaagggcgccgcgagtgccggcctgcgagcttcatgtaggttgagagggtcggagtcgcccgaccgcttgacgtcgacgacctttgcaccccgcccgaccatctttctcctcacgcctctgcctcctcaccgaacagcgttcctgtctccctggttgacgcaacgtacgcgccgccagccgacccgaagtcggcctaacttgctgtagagacccacgtcgcccaggaagcccgccgtcgtcggaggccgccgccgtcccgacgagctgttgccgacgtccgccgacggcccctcgacgcccgttctctcgcacatggacgaggtcctccccaagctctggatcagcgacatctctgccgcgacggacgctgcgctcctagcctcgcacaacgtccgggccgtcgtcagcgtcgtcagaggctcggtcgagctgcccgcagtcggtcttcctcgcctcacctggccctctgtccttcctatccgaactgacctggaagtccctcctgaccggctacgtctgcagaacattgtagcacatgtcattccggtcgatgatgacgacctcgccgacctgctcacgcacctcccaaaggcggtcgaggcgatccgcgccggcctgttgaccggaggcggcgtcctcgtccactgccaggccgggatgagtgcgtctgcgccactcgccacgtcgacgccgatcttgaggctgactgacggacatgtctgtctgcttcaaaggtcgctcggcgactgtcgtcgcagcatatcttatggcaaccttgaagctaacgcccgacgaagccgtcagccggattcgcgctgcgcgcccttgcatccagtacgtcgaggttacacctgtttccctagccggcttcttgggttccgtcctgacgtctcttgcccttcgtgtagaccctcttcaacgttccttgcccagctcgaggtctttgcggccgctggtcaccgagtgtcggccaacgacgcgagcacacgagcgttttaccgcgagcgcatgatgagcgacatgatgggtccgtttcctttttcctctcacttttttcttgagtgccgtcgcgtctacccggcttctgacactcgtgacgacgacgcttggcgttggtcacctccagccggacgcagctttggttcgagcacctctcacctcgcgaggatgcccgcccagtcgacgccctctggcacgcctggcgcaccgaccattaaccgccggcgcaagctccgatgtgccagctgtcggtaggtcctttttaacctcattcgtccgcaccgacgtccgtctcctctgatgcccgcctcgttccgctttcaggcgcgaactcgccctccgcgaacatatccttcacctgccgaccacatccgtaccgacgacggcgtccgacgacccggcagacgacgatgcgacgaccggcttcggccaccaagcgaccgtcacgatgggccacacgcagacgaccatcttcaccccgccgccgatccttgaccctcagtcggcgtgctcgggctacttcgccgaaccggtctgtctgcccgctcccttcaacgcaactcatcgctctcgcaccgctgacaggattcttgtgcttgcagatgggctggatggatcctctcttcgacggcacggccgtcgccggcaagctcctctgcccgaatggccggtgcaaggccaagatcggcaactactcgtggagcggacagaggtgcggctgcggggcctggatcacgcccggcttctgcctggccaggggaaaggtcgacggtcggtcattccagttgctccttgagtgctggcagaaggctgacactcagtcgaggaccgtcctgctcagacatcgcgtattgaggcggtcgaatctcggcaagcaccaacctgtcgcgcagaaacgcccggccccttttctgcccgtcgcgacagccgtacgacggcactgagcgacctgcgcaagtctcccctacctgcttcagcgaccgtcatgacaaacgctgcgccgactttcttcactcgccctctccggccgcgcgcgcccaacagcgacgacgtgcagatcaacatgaggacgtccatgttcatcgcgactcccccgctctcagtggcgatcaaccggtagcgtctcccggccgcgttctcccctcgtgtagccgctcaaaccacgatcttgcggatgctctgcggagcgggagaaaggtgaaaggcgtcagttctgcaattagcgagcgaaggaagcgagcgggggcgaggaggaccgcaccttcttgtccttcttctccgagtcgcggtggttgatgaactcgacctcagtctggaagcctccgctgccaacgacgagcgccttgccctcctcgtagcccatgaccgccgtcttgaagttcctgccgacgagcgtgatccgcttgaggagctcgtccgtcgcggcctcttgctcgggcccgggcgaggcccgcgtccagatggcgatccggtagaagttgggccgggtcgaaaagatgacgccggtgatgaggtcggccgtcggcggcgggccggacgggagcgacgggtcggcgacagccaggggcgtctcaaacgtctcaccgatggcggccagcatctgtcgagccacggagccgagggggtcaggaagcgagtcgacaaggaggacggctcgtgaggggagagccgcaccgtgttgagccacagctggtcaatcaccggccggttcttctctcgcggcatctggatcgaccactttccgccgtccttgttagcgtcgtcctcccaagcagggatgatgctctcctgcagaaaggggaggcacaccgagcgggcgggcaaggggtttagcagaggcgagacacttgagtgcgcggaaggcgggatcgcaccttgaagaggtagtagttggccttcgggggcagctgcgacggcgggacgatgttgttgtacagactgcgaaggtgcgaggcgagaagagggtcagccctcttgcggctaatggcggccataggccctgattgctactcggcgagtgcgagagcgaccgcctcaacctggcagggaaggacgcacccccaaaactcctcgaccgagttgaaggcaaccaccgggcggacgttgtccatccatccgccgccgtggctgggcgcagcgccggcctggacgttcgcagagcaagagcgctgctgtcagtctcgcctccttcatcaccgctagcgagcgatcgaacgagcgtatcgcgaagcgaacatacgggcggcgcggctttaggcagattcttagtctgcggtgactcataccagagtgtccagggagagtatagcgggtgctgtagaaaccgggcacgaaaagtaggcagtcgacgacgtcagggtctaggtcctggactggctcgcaacgcaagcagccgaccggaaggcctggccgagcggctactgccagctagcagcgcccgagcgcaagtgtctcgagacgcaccttgacgttgaacgtcgttgcgttgtggaagacagtctggacgcctccgtcctcctggcccggcgcaaggacgtcggcgccgtcgtcctttgagatgttggcggcctcgagggccgacgtcagggcctggttggcagcctcgatcgaagaagcaggcataacattctcgtccttgctgtctgagccggcgggaggcgcgtcctcaccggtcgaggttgaggtcgaggttgtgggctcggcagcggcggcaggctgctcctgctgctcctgctcggtcagggtcgggtcggcgacgggggtagccattgtgtttgcgcgaaggaagggacgcgcttttgagggtagagggtggagaagggcaggtgttgtggctagagggcaaaggggagtaagagccgtcgtagagttctggatggagggtgagggcgacaagcgcaggctgatgggcgagcgagtcgctttgccggcaggggacggaacctagggttaacccgcgcgcgcgcaggcgaccccaaatctgccctgcggagcgagcgacctggacgacaacgaccctccctctcgcacacacctcgccctcacaaccatgctcaaggacaagaagcaaaagaaggaaaagaaggagaagaaggagaagaaggtcaagtcggccgtcaaggtcgagcgcgcaacctcgcccgccgttgccgccgccagcgaggagcctgtcgcttcgtcctcgaccgccgccgctgtcaaggccgagcccgaggcggacgagccgatggccgccgacgacaacgacgacgcctcctcgtcgtcgggcgctgcggctgctcctccggccgagggcggcccgtccaaggtccagatcgatgacggcacgcttctccagatcgacccggacgcgccggcgccgctctcccgcgcagccctgcgcaaggccaagaccaacccccctgccgccggctctggcgaggacggcgagccaggctcgtcctccgcagctggaggagcggccgaaaagggcaagggcaaagcggccgaggcggcatctgccaagccgggcaagtactcggtctgggtaggcaaccttgccttcaagacgaccgaggccgagctccgcgactacttccggccggcgctcacgctccacggcaagggcaaggcaaaggcgacggcgaccgacgacgacgaggacgatgacgaggcgagcgggtcgtcgtcgtctgagagcgaggccgtggaggagacggctgagggcggcgctgctgcgcccaagaaggctaggcccgagccgaccatcacccgggtcaacatgccgaggagcaaggctgtcggcggccggccgggcgtcaacaaggggtgcgtccgagcgacgtcttgtctctgcttgatcgtcgagcttcgctgacacccgagagcgcgtctttcgtccccggcagattcgcttacgtcgacttctcgaactgggcatcgcaacaggcagctgtcaagctctccgagggtcacctccgtatgtctccacactatcggtcgtctacaacctgggtgcagtctcctgacagtcttcttcctctcactgcagacggccgcgcgcttctgatcaaggccggcagcgacttctcgaaccggcccgaggcgcccaaagcggccctcgcctcgctcccagagggccagacaaagtccaagacggcccaggccctgcttgctaagcagcgcaacccggtcggctgcacgctcttcgtcggcaacctcggcttcgaggcgaccgaggaggcgatgcgcgagctcatcgacgcccactggaagacgagcctggccaataacaaacggcatgcgcagaaggcggttcgaagcaacttcttgcccgagagcgagacgacggccagcggcgaggatattactgcgcccgctgagggcgaggcgggcgacgcgccggcgaagaaggacgacccggcggaggcactcgtcggcttctcggctggcctccggaaggtccgcatggcccagttccaggacagcggaaagtgcaaggggtaaagtcgtttgcctttgccctgccgttccatcttgaattgacatagtgctgcgctcgccctccagcttcgccttcctcgactttttcacgccggcccaggcgacggctgcgctcgtcgacatgcgcaaccaccggctcgacggccggtcgctcaagatggaggtgcgtcccagtcgctccccgtcttctcgcgcgcgcttgctcgagctgacttcccccctcggcctcccaccgcagtacgcgtcaccatcggccgccgcccggtcaggcactggctcgcactcgttcaacgccccgatcgccggcgccaacgctgccgttgaggagccgtcgacccgcccgggcccgacaccgcggacgacgcgcaagatccggccgatgaaggccgagcgggcagcggcgaagctcgctgctgccgtcgcggccgggacggcgacgcccgacgaggtggccgcgcacggcgctgccgtcgctgctgccgctgagcacgcgacgtctgacggcggcgctggagcgggcgaccggaagcggagcgcgccagccgagggcggcgagcgtcgggcacggccggccaagctcgcaaagtgggagcaaagcggccgacaggcgcccggtgcggcgctcgcgatggccaagcgcgagaatgtcggcatcgtcgagagccagggaaagaaggttgtcttcgattgatgacgatgcgctctcagctctggtcccctttccgtcccgtcagtagaggtcgcagagagcgagggcatcgggcacacgtcatcaaaggtcgcttcgtcgagttgttgtcgacggcctactcggcgttgtatgcctccagccagggcaggccggcctggtcgcggagggtgaggccaagtgcgcgcaccactggggcaagcgcgacgaggcagaccctgtcgcggccggcgcgggtcgaaaaggagatgggcttgtcaaagttgtcttcggagacgatcttgatggactgcagggccggatagcgatccggatgagcctgaacgaggcgaatgatgccgttgagtgcgacgtgctgagatgagggtggtttggggcagtcgacggcgctaacgcagcgctggttgcacgccactttagcaaggactagccgatcgtttcgagcgtgctgatgctttgagatccgatcaagttcttgaccgtatgagtagcttccggtgtaaggtacatgtcgaaacgccggagctaacgtaggtcaaaaatggtgggaagggccgacagatctagactcccttcagtggtactgccaaaacacctccgcccacccaacgccacacgtcatctacaaagagtcgtttcacgtgacggacctcggctcgcagctcaagccggtgatcgaggtgcgtccggtcggtcgctcgctcgctcgctcgctctcttgcaaccgcgccttcggctcgcgagcggcctctccgctgtcggtttatcggacgctgaactcctccgctcctcccttcgctcttccgctcctctccttgcccctcgcgccgcccagggctggatggcctctgaagccaaacggacctgcgccgcctgcggctttgtcaacgcccccaagtgggactgagatagaagccttgctagttgacaaagggctgccttcgtttggagaaacgggctggtgggaagggggagagcggtcgttgggggagcgctgcttgacggacaaggggcggggacgaccgaaagagagtgcgctctgctcccgagtagtgcgagtggataaagctctccttacgcctacggggaccgctgccaagctcaggtagccggtctcgctcggcgcatgccgccaggtgtgctgatttccgagggaacgagagacgacgagacgggctgagacagacagcttgagatgggcagctcgcggcgcagtggaccggtcaacgagctcttccaggaccgggctcatcagcaggggggtgatcatcagccaagcggggcccatgagctcctgccagcctccctgcctctggtacgcgtcaagcgtgcagatcaagagccattagaagaggtcagagggtcggtgccggtgggagtgggttaatcggacctagagtacgaggcggctggccagagcgccaagactgcggcgtgcttgcggccgccgagcggaggttggacgatgagcgtttgaaaagcgcagggctgctcttgtaaccgggccaaggatgctgaatgcataggaggagtgatgttgtcttcctgccgaggtcgtcggcttccgtcagcaaacagagggctttgcaacccgatgtgccgtcgttgctcagaaggcgacggaccggatctgccggcacaagccgacaaccgtcgaaaagggttcatgtcggggcggtcgtccgaccggcggcgtccacctcgtcatggccgtatccggcgagagtcctcagccagtagacgatgagcagccagaagctggcaatgtagacggtgttggccaaccggcgagtcgaccatcggcccttggactgccgctgctggccgccgccgttgtcgagctcgagctcgacagcactcccccgccggctgagcgacgggaacggaaatggagggaacgtctctccgtcctggacgaggtcgaaatcttcaaccgagcggacggccgacgacttgcgctgcgggctgccggcggccttttgaaagagcaggctggaggtgttggccgaggtcggcaatagtgccggcggcagccagctcgagggcagcgttgatcgcagtgtcgaccacaggagggcagccgtcatgccgagactgagagagcgtgaggtctcgcttccctgtagcttgagcaagcggagagacagggagagtctgaaaggtaggtaggtcgtgggttgacttcgctcagccgctgcgcggcccaggagctacagggtgaaaagcggcgttttgcgaggccggctccgcgcaagcttggcgctggcgcgagcgagatgaccttgccacacagagcctcctctcttgacgccacaaacaaatcctctggccgccaacggacggctcggatgcctcgccgcaaggggtcatctcgctcgacaaccatcggccggatagcgtttgcgcaggccggaggcgactggaagcgctgttcgacgacgacagcccatccagatgcaacgagttacagttcgaattaagcggtgtcggcccagacgtcggcccgctcgcaccccaacgcctcccacgaaaggaactcgcccgtcacgccgaccgtcgcccctcccttctgcacgcgctcgcgcacccagcgcttgacgtgcgcctgctcatcggctgtgcccgagccgccggttacgaaccacatgcgcgaccaccatgagtcccggtcggggccgttgccgggcatagggccgttcatgagcgccttttcatgaccgttgaagtgcaggacgaccggcgtcgagccggaggcggtgtttcgtgcgagcttgtgcgcagctagaggtcgaccgggcgcggacggcgcgggcgcgaggtcgtgcgaggaggggaggaaggcaatgtctcttcttgagtaggttagcgtctggaacagggtcgaggccatgtcgagcgagatgggcgagtctgggcgggcgtggtagagcgatctgcgctctcgaaggcaagagggtcagttggcgagcaaggcctaaaggaggggcggaggtagagacgcacatgaacagctgctgatcgccaatgttggggtcgaacacctgccgatcgccgatgttggggtcgcgctcctctgcaagtgccgtcaggtcgtcgtacagcggccgcaggagcgaggccggcccgaggatcgtgcccgagttgggccagcgagggcggttgagatgaaacgtatgaccctgcggcaccgagcaagaagcatcagctaccggacgtgacacgcttcggcaagggagagtgtaaagggaggcacatgcgccaactcggcgcccatgtcggtctcggtgccgtagatctgagccggcaagggcgattgggggatgtcaacgcacgcggctgcgttgtccggcggcggccagcagcgcttatcggcgccgagcaggacgcgcttcgggtcggccatctggggacaaggggaaagtcagtcttaggaagctgagtttggaagggagggtgaaggagaacggacgaagcgatcgatgaggacctcgggcggctgctggaaccacacgtctgtcgtcgagggccgagtcagaaaaatagtcggcggaagggcagtgaaactgagacgtaccaaaggcatcgaccatgaagacgaggtcggtcggatcggtcacgttccgagccaggtagtcccgaaagccttgtacctgcgtcgtcctcgctcagtcagcaagacttgcgacgactagcgtcccctcctaagttggacgcaccttgatctgccgcgccttcccgcccgtctccttggcgccccagttgagtaggatgggctcgtagccgtaaacaagggccgagaggagcgacctgcaggcgagcgggttcatggaagttgctgggaagaggaagtggagcctgaggtggggctgcgcgtcagtcatcgaggtcggcgaaaaagggtctgggcgggcgagcccgtcgagcgacgcaccttggtcgggaagagacgacagccaggcccggagccgccttgttggtcgacgtgagcaggttggcgaaagcgagcaggctgaggccgacgatagcagccagcccgactagccggagagatagcctggccattgctgcaggagatgatggttcgtgtggtggtggtggtggtggtggtggtggtgatggcggtggtggtggtggttggctcggaacgaggtccctctacatgggtaagggctgaatcgcgagtagacgaaacgcaccggcattggcgagagcgcgcgacctcacaaggccgccacacgcgtgcagagtggcgaacaagacgcgtcgcgtcacgtccttcgctctcgcccctttgccctcttccgcctccgcctccgcctgttcgtctccctcacgtacgccgcatgaccccgtccatagcgctcgagacgctcctccccgcgagcacctcggcctctcgaacagtagcagcagcagcctcccaccggcgctccggctcgagcgcgttcagccgctcgcgcaagcacttgatcagccgccggccgcttgccctcgtcctcgccatcgtcgtcctcggcaccttcttcttccggctcgacgacgcgcgctcgacggcgagcgagacgctgggcgcgtcggtcgctggagagccgagtaggaggccgaagggcgaggggggagggccggctgcccatctgaggccaagtcaagggccgactgaccggttcagaggtcggtccctcccccgtctaatctcctccctggttgggttgcgacgcggtctgacctcgaacttgcccttctttcagacagcctccggcccgacaagcgctacatcacgtcctttcaggtcgccggtttcaataaccagctgatcggggcgatccacctcttacatctcgctttcctgcttcagcagccgccctacccgctcccgcacgtcgtcgtcctcccgcccatcacgccgcacagcggccacctcggcgcggcaggcacgggccggtcggtcgagccgtacccggtcggcgaaatctttgacctgcgcgcgtttgaggacgagacgggcatcgccgtcgtcgagtggcgcgacgtcaagaagctcgagaacgtgaatgtgccgggctacccgagggaggacgtcgcgtgttggtcgccgcatatgacgcaggtgcgttaagagctcccgagttggctcggccgcgctctaattggcttgagcgacacgacggcagtttgacggcaggcagcacggcgacatggagcaccagctcggcctcagtgcgtcgcccgaggaacccctgtgccaggttagcgggaggctgaccccctactcctctgcccgccgcagagaccatcatgacgcccatctcgccctcgattctgacggccaaagaccaccacccgccgctcatcctcctcccacacctcgcgacaatcctctcgccgccggtcaacgacctccggtctgactttctcagcggcgcctcgggcgaggccgagcggctcatgacgacctgggggcacagcgacatgcgttggaccgacgtctggggtccgagcgtgccgggctggcgcgagcccgagggccggagcccgggcgagctcgtctgccttgactcgctctacttcgcctcggagcggggcgagggcgtgacggacctctatgtcgggggttcgaccgacaagggcccctgggcgatggtcggccggcacttccggtggcatcccaagctcgaggcgcaggcggaggacgtcgtccgcgccgtcctcggtctcgcggccggtgcgccgctccctcacctcttgacggttcacatccggcggaccgactttctgccggcgtgctacggcgagccttggtacgctctcagccagcgtgcgacatacctcggtcggctgccgagggctaacacagtccgtcttcttgcgcagcctccgagtcgtccactacgagcggcgcctgcacgacgtccaagctcagctagcggccgctggcttcgacgacgtcaagagctggcccgtcctagtcacgaccgatgaggccgatccgacgtgcgttcgagcccactgcgctgccctccctcttcctgactcactcgccgctcttccctcaccgcacgcagatacctcgccgaactcgcggccaaaggctggcacgtcgtcgaccatgtcgcgctcgagacgaaagcaacagccggcgactggggcccgaccctgcttgacaatgtcctcctctcgcttgcaaagggctttgtcggtacgtcaaccagtcgcgcgtcaaataaacagccggccgctgtcgatgttcacgcctgaccttttcctttctttttctgcatcaggcacgtcaggcagtacgatgagtcttctcgccctccgccgcgtcgcaggctggaacgacggcgccatcgcgctcgtctcgtacctcgaccggtgaagcccgattccagcagacggtagtcaggacaaagcctacctgcatcgcgcctcatcctcgctctcgttccgactcgagtccgtgacgtctgggccgcagacggtcgcctcgctgccgctcaagccgcactaccatgcgcctctcagtagtgggcttcccgagacctgcctgggtcattcgacgccggtcccgacaactttggtcggcgtgacggagcctgccactgcgccgtcgctcctcgatcttgaagatgtcgtcaacccctagactgcaatttgtctgaacggttacgcaggggggtcgcaaaaagctttgatatcgtcgcagaaagatgggtgtctagaattcttgttttactcgaggcgcccgttggcgtggcgtccttggtcgcctgtcggccgtgctttatcccttgtaggagcgcccgtcccggttgtcgtcgacgagccgcgcccactcgagcgccagccgatagacactgcaaagggcgagagtggaagctgtcagagacgagagggcacctctggttaagctcaagtcggcaggcaaaacgcactagatctccatgtcgaccttgcggccgatcgtcttcatccactggcggccctcactcgcaatcttgcggagctcgcggtcgtcgtggcggccggccgggtggctgacgttggcggcgaccaacatggccggcgtcgggccggaaaagtaggcgtggacgttggcgagctccttgtacgagcttgagattgggataaagtggaccctgcgaggagacgggggaggcgggtgagccaatgggcaaggagctcaatctggtcgaaagaagacacaccagggctgaatccagtcggagaagtattcgcggtagacggttgccttgaggacggcgctctggctcgagaggagcgcgaagaagcgggcagagtagcccatgccgtcgagatcaagcaggtacttgtgtcgccaattttcgccgagcgggaccgggtcgtcaaatcggtgacccttgcggaggccgtcgcagccgccggggtactgcgtgcagccgaccgccttggtaaaggcaacgtccatcgtgtcatcgttgaggcggcgcgtcggcaccttagtctcgacatagtctttcgagcccggcggcaggaagacgaccggcttgtcaccattggtccggtcagacgtcatgcgagttaggctgcgtcccggcgttgacgagcgagagaagggtcagcctgaaaagaggaggtgggggatcgcgacatgccgacagacagaccggtgtcgctggtagcgcgtgaggaagccgggcggggtcgacccaccgccggtcgttgcgccgcgccagaagatccggtcgcccttcttctcccaggcgacgtccatgtcgtcaacgtccttgatgcgcatcgtcgccgggtcccagccgtacgtgtagcgcttggtggccgaatagtagtagtgcgacggaatcagaatgtcgccgaagccggatgccttggcgggcgagaacattgggtagagggcgccgatcgtccgccagtccgagaaaaagtggccctgatcatagtgcgcccaggggtgatcgcagaagttgaagcggtcgtcgacgccgtcgggaaaggtaaagtcgtcagacgttttggcgacggtgatgccggcggcctcgagccagttgaagggcgcctggtcgtcgctcagccgggaccgttgcgaggagaagagccgccgagcctgacttgttggctcgcacgttcggcggaaggcttcccagacggaaccgccgtcgccggcccagtcgggagagaagttgtcgatgatcgacttgtctaatggcaaggagaggacgaagcgggcatgcggctgtaagcggccggttgtcgttgagctctcgcaagcgcaggacgcacgggaggtcgataggttggcaaacctactctgctcccaaggcacgagcacccgaggctcagccttttcgttgatggggaagtccatgtcaggcagcttggctgagggtgcacgttcggccgaggcacagtcagcggtcctcgtcgcgcttgaagaaagccagcccggcagcacagaacgcaccttggaacctctctagcatggcccggaaccctttggcacgagctccgacttctgcatcctcgaggccggtctccgcgtcgatcgtccgcagcctgccgtctcggacgccgatgatgtcgaccgacggcaggaggccggagtcgagcgcccggcgccgaatctcggcgcccgagagaagccagaacggccggagatcgtccatgagctggtcgtactcgtcgatgacgacggcgccgtttgcctttgcaaacgcgtaccagtcgtcgaagcccgtgggcggcggccggccgtagcgccgcttgtactcggcaacggcctttaaaagcgagcgcgactggctagagaccattttgctgaactgcttctcggccgccttgatcttgagcgggactgggtgaacgatcttggacggcttgggcgggcccgacgagtagagccggctgaagtaggtcggcgtcgtgaaggtgcggccggcggcgtggcccgccgaatcggacgacgagaagaccgtcaggaggacgagcacgcatgtgacgccagcaagagccaggtagagcggccgaatttgacggacggctggaggcaacatcgacgcctttggccgaagggtaggaggagcgctagcagacatggcgaggaggacgcgagcgagcgggcgcggggccggccaggctgaagccgtcggcgggaaccgggtagagacgagaaggacggcggccgagcgttaaacgatgtccgacggagcgtcgtctgagctggagaagatcttgaagagcaaggctgaggtcgagcgacagtcgtggtgagacacgcaagaacgaccgacgaccagcagcagcagcagcaggaacgcgcgtgccggggcgcgccggcgccggtcgcgcctccttgttcgcctcggctggccctgcctcgtgccctccgacgctcacgctcaaccgaccgacttctcctccttgactccgggccttccggtcaggcaagaagcgactctgctcttctccaggttgcccaaagatggttgaacagctcctgaggcgcttcaagcgccggcgttcgctgcggatcctgctggccgccggcgtcctctgcttcttcgcccagcagctgggcctcttcggcagccgttcagcaccgacaggatccgcctggcccagtcagcccgagcgatacggtcgctcgtcggacgctcggccgagggcgggcgtgccgaaagctcgctctgccggatcgcctctcccagccacgggagccaaccttaagaccaagcctggcgaacacgcgatcaaaggcggcttcctagaagtcgacataaatctctcagcgactcagcatccgattcggcagctcattgcggccggccaggctgcctgggatgccaagctcgtgcgtcagagcccgacgctgaagcaagccgttaaggagtacaagcgccggcacggcggccgcaacccgcccaagggcttcgacaagtggtgggcgtggcgagagtacgtctgctcgcgggtcgcccatcgcctgactttgactgtcgctgaccccgctgtcacgctttgacccgtcctgcaggaagaatggcgtccagctgccagacgagtacgacaagattatgctcgacttggcgccctttcgtggcctcagcccggccgccctggtgcgtccggcggtcttgcgcgtcgtcacatgagagggcggtactgacgtccgtggctcgttctttcttcgatggcaccgaagcgcaaacgaatcaagctcctgcgaggcatgatcgacacgtgcacattctcagtccgcgacggcaggcttcacatgtaccccaacgaatattcgaccgacatgggtgcgatgcgtgccgagggccagtacgacttgatcaaggacgtagcgcggttcattcccgactttgacgccgtcctgtcgatccacgagtacgtccagtcgccctgaatggagcgcaagaggggtggaccagctgatgaccagccgggctgcctcgattgtagcacgccgacgcagtttatcagtcacagccatcggatggagctccagcgcgcagatgacgatggagaacgtacgtccgagtcaactgcgagtaataaagggtcggaacactgaccgccgttgctctttcttttcgacgacccctcagcgctcgaagacggggacgagggcgaccggtccttctcgaactggggcagcgcctgtcctcgtacgtgtctcgtctgttccttggctcttcaagcctgtgcctgacctggcccgcgcctccgacagccgactcgcctctgcacgatttgcacaaggccgaagcactcgaccccaacctattcgatccggactacaaggacgtcgaagcgacggccgacagcgacgagatcttcatgggctggaagccgccgcgcaacttgaccaagtctgagcgcgacttcccgtcgatggtcctcaagggcggcgagaagagctttgtctggtcgcaggagggcatgatggacctctgcgccaaccccgactttgtcaggctccacggcgccatgaacggcctgcacccgatcgcaagcccgaggctgctgcccatcttcagcctcagcaagaccaacctccactcggacatcaccgtcatcccgactgagcagtggggtcccgacaacggggcgatgctctgggaggagaagagcaagggcgtcctgctctggcgtggacgcaacacgggcggctgggcctcaaaagacaccccttggcgttcagcccataggccacggctcgcgcgcatggcattcgacaacctcactcgggcggtcgacgtcttgccgccgtcgacgtgggtcgcaccgggctccaagcggctcagagacgtcatgctcgagcgcaagcagggcgagctcaaccgcgacctcttggacatcggcctcgcgtaccagccgatccagtgcaaccgagtcgacggcacctgcgcgcagctccagacggaatgcaagtacacgggcgtcttgacgtttgcacaaggttcgtcagcggcgattgtggctccttcgacagcgctgctgacgacgctccttgccccgacgcagaaaaccactatcgctacatcctcgacatgtgcgcctcccaagctgctcccacatctcttgcttcgagcggctgacccgctgaccttgcatctcatgcagtgacggcaacgcctggtctgcgaggcgaatccttcctgcatcgtcacctttggccgtgtcaccgagctgacgctccctctcgtgtctttgacaggttccagcgactgctcatgacgcgcgccgtcatcgtcaagaactctgcctaccccgagtgtacgtctgccagcgcctggcccgactcgttttgaaatctctcggactaaagcgcccttctccgtctctgtaagggttcaatgaccgcatccagccctgggtccactttgtgccggccaagcttgacttcaccgatatctacggtgcgagccctgcctcgccatcagcaagcatcagtcgacggcgaggactgacacggctttttctctgccttcgatcgccagacatcatgactttcgtgcggcccgcctcgtcgactggacctgatctctgcccagccgcctaatgctattttcgttctgtctgactcacagttccagggcgacaaccagtcgaagctcggggaggaggatctcgcccgcgagattgccgaggccgggcgagagtgggcgctgacgttctggaggcacgaagatatggtagcctacatggtgcgcccctcgctttcctgacgcgagaaaaggaccgggctgtcgactgacgtctctaaccaccgaccggccgaacgcagttccgacttgtacgtccgatcgaccgccctccgctgttgggtgtggtacaaggctgaccgattcacctaccccctcgcttgccagtatctcgagtgggcacggctcctcgccgacgaccgagactcgatggactttgtcctgtagacgttccaatcttctctctgctcctatctcttcctcaacttcctgttttcttatagaaagatgctccttgcgcgacgaagccggacaaacgacggccctctgtcgccgacctcgagcccagcagccaaggcgccttcgcttcagtccaggttgtgcctgcgtcgacagaggcgatcgccaggatcgcgccgcgagagacaagtgcccctcggtctagaacttcgaagcggcgcgccgcccgcctgacttttgccgatccatcgccaaggaaaccagtcgcgtcgcgtcgccttgttggcctgacggccgtcgagcccggctgcctggcccaacaggcctcccgtccgaccgccaccttctctccccccttctttcgggcgagcgcgcttacttcagttctcccatccgcttcttgcctgctcgttcggcagctcaagcgaccgccttctcgtcgccctcctgcctcttgctccgaagcccgcagcaagagacggcggccttccgacggccacttccaagcagccgtctcatcgtctatagcactccggcctcaggatgctcgcctcagcgtccgccctccttccgcttttgctcgcactctcgctcggctccttgcctagcgcaagtgcgcatggtgtgcaggaccgtcacgctcagcaccaccggctcggccagaaactcgcctcgtccttggcggtcgagtcgacttcgcttgctgggtcagcggcagcacccaccgtcggtaccaaacttgcgaccgacgctgtcgtcgctgaacccgccgcagaggcgtcgcttgccgcctttccttcgctctcgtcacagccggccagcagcctggccgtccgtctgcccgcccgcgctgggcgcgtcgagcgcgctctgggcgacacgaccgtctggcagacggcgaccgtcactcagactcagacacggcagctgacggtccgggccgcgccgccagcagcgaccgacgctgccgtcaaccctggggtcgccggttgggagacccaaggatgtgcgttccaccagttccattacgcacggccggcgacagttgccggaatcccctgactcggtctctgcttgcttctgcaggcttcgtcgacggcccggtccgacttttaagcggctccaacacgcccgactcgagcctgacgccggcgggctgcatctctgcgtgcgctgctaagggctttgcgtacgctggcgttcagaacggcaagggtgcgtctcgcccgaggccgtcgacgtcaaggaacgaggcagcgcgctgattcgactaccgtcttcccccttgacccctccgctcggccggcagagtgcttctgcggcgggtcgctcaacgcctcaggcgaggtcggcaccaaggtgggtgagagcgagtgccaggcgaaagcgtgcgcgggagaccagttgcagacgtgcggcagcgactggcggatgagggtctacaaaagcgtctcggcgccatctcaaacactcccctcggactggacggcgcaaggctgtacgtcccctgccctcgctcttgctcctggcccacagtcgtctgccgggcgctctcggtcgcgaggctgactgttacctctgtccgcctcaggcttcgtcgacggccctttctggacgccggcgtacgcaaagcccttggcgacgcacgcggcgatgcagctcgccggcgtgaggctcgctccgaggtcaggcttcagcccgctcagcaggcgagaagggccgtcgacgaagcctgcggcggacagaggtaacagtcagcctcgcgaccgagagcgcccggcagacgactgtgggccaggagcaagagcgagggcaggggacgtacagccttgcgccgtccagcccgaggggagtgtctgcgatgcaggcgccgaggcgctcttgtagagctggagccggtacgagccgccacacatctgcgacttgtcgcccgtgcaggcgacctggcagcctgagtcggccgccttggtcccgatctcgccagagaggttgagcgacggcccgcagtagcactctgccagtcgccatcggccgtcgttcgagtagagtagagagagcgagaaggaagcaggaagggagggagcagggaagccagtcagcgctctgcgccctctgctcggctaaagtaggcagcctccgggccggacacgaaccgttgccgttctggacgccggcgtacgcaaagcccttggcgacgcacgcggcgatgcagctcgccggcgtgaggctcgctccgaggtcaggcttcagcccgctcagcaggcgagaagggccgtcgacgaagcctgcggcggacagaggtaacagtcagcctcgcgaccgagagcgcccggcagatgactgtgggccaggagcaagagcgagggcaggggacgtacagccttgcgccgtccagtccgagggcagagcaatgggcgtgctagacgcggacggtgtaggctcggacgtcgaagtaggaggcggggtatcgattgcgcacgtggtgtcggtcgagcggtagagcgacatggagctggttctgaagatcgcatcgcaacgaaggacagaggcacgcgtatccaagccagagccgtcccaaacaagggtcaggaaaaagggcggcctgctttgagagacaaggactcaccctccacatgtcgttgtcggatcgcccgtacagggcgcgtcgcaggacgacgggtccgctgcgactcctcctcctgacgccgtgtcgagggcgtccgagcaccaacattcttggccgactaaagagagaagcggagggtcagcattgaatggagtgggggagtgattgcggtgcggatggagacggacactggacgccggcatagaggtaagccatcgaggcgcaggtgttgaggcattcggcgaccgtcaggttgccgaccgattgctcgacgtagccgaccagggcgcgctgaggactggcggcctctgtcacacagcccagcgacgtccaatcatcgtaagtccctgggtcgcggcgagagagagagctgcgagcagtgtgcgaccggaagagcgaccggcggtcggtgtgagcggcgagcgaggtcggggcggagccgaccgccgcgacaagcacgagcgcggcgagcttggtggccggcgtggcaatcatgcggcctgactcgatggccgagctagcaagggatagggagaggggcaagaagggcgagctgtgaggatgtcgttgagcgtcgagcaagagagtcgaggttgcctttgggctgaggtcgccctccgagcagcacaactgattgagggatcggcgcgccgcagtgaacgcgaggcgcgcgtgtcgcaaagacacgaccgccgacgaacgagcgagtctcgaccgcctgtctggccagccaacagcgtccaggacggatccttcaggcagaaagacgaagcggggcataaagagacagccgtgacagaggtccaggggcgtgcacaaagggtacaggtcggaaagaaaagagagacagaggcctcgccgggtcacatctcctcgaggtagcggtactcaaagcggaagtccgacttcttacgctggcaccacgagttctcccagtcaaagtagatgtactgccaggccagtcaggacggccggtccgaggagtcagcgacgcagcgccttgcggatcgagattacgcggggacgcaccatgccctgctcgtagtcgtcggtgatggcttgcggctggctcagccgctggaaccacgtcagatactgcttgtggaagcgccagctctgcttcttgagctcccgggcggcgagccacctgcgggcaggcatgaagcgtgatcagcggacgattctcttctttcacgctagtcggagcgattcattgccggccggacacactgctcgtaagtgttcgcgtggtagtagaagatgtagaacagcgtgtcgaggtcgagcttggcgtaaaagtccttgtcctggaagcccgcaaacggctcctgcgggtagtagagcggcgtctggtgcaggttcttcggaatgtagtagcgcggcctgaaagtcggcagagcagggtcagcagaagcgacggcagagggctcggtgggccgaaactgacttctcggcatcctgcggatgcggcagagcctcgaatgacgcgtcaagcgcagagtgaagctggtccatgtcgcccgcccgttgcgaggctgccgccgtgagattgaagtcagcactgaggagagaagctaaacaatgaccaaagaggtgcgtacagcgctgctttgcgttttcaaagctcgacacgagatctgcgagggcgtttggcaggcgcgcgccgtcgtttcgcgaagccggctgggcagcctgctgcgacgctgacgatgacgataactgctgcgacggaggcgcctgcgcttgcagtgacggagcgatgggactctgggcgctgctcgagggctcggccgggacggccgatgacgggccgggtgaccgctgcgcctgctcggcgagaacgctcggtatcggcggcgcagaaggctcggcaacgcgagatgttgaaggaggagacgccgcggacgaggtgatgggcgaagcaaagacgggcgcaggggctggggaagaaggggcgagagagggaggggcggtggccgtcgtcgaagcaggcggcaccggcgcagaagaagctggcggctgtgaaggggcgaccgctgcggcagcggcagcagcgtagcggatggcgggcaggggagcagctgttgatgttggccgggggccggttgccgtcggcgtcggaggcatgccggacttgagggcggacgacatcggctgctgattgaagttcggcttcggcacgggaggtaacggctccgatttgggctccgatgcagattctaccagacgtcctatcgaggccttcagctcccgggacaagaagagacaaccagacgtgcgggcaactcactctttgacggcgtcttccggatgaccgggctcgccggcccttcgtcgatcgaagccttgcgctcgcgtccgcccggcgtcggtgcttcgtcgtcgaccttgatcaggccccgcgtcttaatcaagactggcggatcttgtgaatagaatgccctcggctgtcagctcgagcagcagcagctaatacctcagcagccaggcaagcaagcgcaccgtccgtgaccgactgcgagtcgtgcgacgactggacgtcgtccttgtcgttgacgttgagcaggtcgtcgtcctcctgcagatccagctcgtcgtagatgccctcgtcctcttcgaagtcctcctcctgagggatcgtgaggcgaaccgcacttgagtcagtgacacgtgcaggttgtgcaacaaagcggctcgagaccggagacggacctggttcgactcgacgaagtagctgatgtcctcctttgtgccgtcgaccgtctcaacactgatgctgccgttgtcgaccatgcgctggataagctccatccggccgacgtgccacttccggcgctcgttgagcgtctcgagctcaacgatgcgctcgccgccagggcccttgccccgcttcttgccgcttgaggccgcgagcacctcgacctcggcctctgatgcctcgacctggcgcgcgagctcgtcaatcatcgacgagagccagttgatcgtctccatcttggccttctcggccgggtcgagcttcgccgcttggatcaggccctccttcgaaaaggcctttgtcttcatctccttctcgagcgccttgaaacgctccatttgctgaaagaggcataaaggagcaccaactggtcagctcaacgacctcggagccagcgaggcaaggccttcgggaccggtctcgcccccatcacctcgctcgcacaacagcgacgcctgtgcaaccctggaccctgctgacttgactgagacgtcttgataggaaacgtaccgtttcaatcagcttgcgcgtttcgagcagctggttcttgtccttgatctcgctgctcgagatccaagtcttgatctggtctcgtagccgctggagtttcttgatctgcgtcttgaggtccgtctcgcacttgtccttctgcgtcgagttagttgaggcgttcatcttgtcaaagatcgactcgaactgctcgacgccctcctggaccttcttaagcgtccggtcaatctcggctgcagtcaatcggggagtagcaggtcgagcgacacgaggcggggcgcggcaggcgacggcggcggcgacggtcagcttaagcttctgtcggaggtgcggaggcaccgcaagcgctggtgactaactctgcagcttgcgttgcgccatggtgaagcttactgtgtctcctctctgcagagggcttgttggagatgaggtggcaagggaaggagggacggtcgggttgcagtcgagctcgtgtcggtcgccagctcgctcgcaggcggcggcctcgccggagggggcggcgttggaaagaaattaaagggtctcccgcggaccagtcgtcctcatcgagggcgacaagcacgtcggggcactttgctcagatccatctcatcgtcgatgactgtcgcactcttccctactccaatctacaggctaggaagcccggcccaccctcattcagaacctaccgctcggacctgccttctggcgggctcgaccgaggccgtccctcacgcgctcgactcgcttggtcgcgtgatggcggaaagcatcggtggtggaaaggctcggcaagtctgggaggggtccacaggaggacgctagtcgagaatgtacgtcaagataccggtctgctagcatatcagcctgggcgttgggcttcagtcaggcagactgattgaacgcaagggaaaagcccgcggacacacctcaccgcaagcctcagcgccccaagccctcaaaggccttcgagcagtagccagcgagggctgatgaagagggaagagagactgtcagccaagggcagcaggtttgatgagcaaggggtcgcgcctgtatcaaggacctcgaacttctttttgagtcatccacgacgccagtcgtctcatggaacgtgatgtctccgccgcttcttatacattgacgccgccgccgaggtcgagcctaatggaggccatctgaacgagataaggatccggcgtgttgtatgtgtgccggagggccaagggcgtcgtcggcgtgatataagggggctctgcgccaggcgaggagtaatgctgccacgaccgcagccaaagaggagaggcgcggcaaggggtttaacgctgctcaaagtcgtcgactgctagcgctgacagaagagggtaagcgtcccgtcaggcatggtcggcagcagcggacaacgtcctgcgcacgaagcaggaagcgctcgcaatgcgcctgccgttgcggcgggttgcaccgctcgtgacgtcctcagcatcgaggacgacggtcgacttgctgtgcctggaagctcccttgcgcgagagcgggtaggtcagggcagcgccttggcggccggcgcccgcgatgaacatgtcggccgaggcggggaggcctggacacgccgcggaatttgtgcgcgagtagagcgagccctggccgcggttggtcgcccgccagtgcgagagcggacgatcgaagtgccaatagcaggccaacatggctgctccgagaccagatgggagtcagggtcacgtcgaagcgatctaggcggctcgagggtcgacaactgcaggacgagctgacagcgctgcgcctctgtcggacgaggccggccaacgctccgcgcctccgagctttcagcccaaccagcagccgcctgtcgcccccgctcgccggtcaatccttctttcgacgcgtcccgagcattcttgactgtcagctagctgcagttccgcccatcctcgagcggtcaccctctcgaaaaggactgccgcccgacgatgtcctgctctgacgccaacgcactggacccgacgctcgccttcctccagccgctcatcggtcgcggccgcccgtactcgcaccggccctgggtcactctgacctacgctcagtcgctcgacggcaagctcgccgggccgaaaggcaagcagatccagctcagtggtcgggagagcaaggcaatgacccatcggtgcgttggcccagctcaccctttgcgaggtccagccagctgacatgcttgcgggcctcgtcgtccgatggcgcaggctgcggacgatgcatggcgccatcatgatcggcattgagacgcttctacacgacgaccctctgctgaatggtgggcgcaatcatctggtgacctgcctgctcggatccgaactgacgcaccctccgctcgccccgctcagcacgcgacctgccggccctacctggcggccgagcgcacaaccagccgacgcccatcatcctcgacgctcgcgctcgcttcccgctctcgtctcgcctattcaagaacttcaaggaggacaagggcaagcggccatggatcgtctgcgactcgctcatgtgccgggccgatcggcggatcgagctggaggaagccggctgccgcatcctcgtcatgccgaccaaggggacaggtgtgtcgcggcttagtgctggaggctaggaccctgagctgggggctaactttggtttggtcttgcgttgcgcccgccaggcatctttgacctgctgccgctcctcgatcggatcaacacgtcgatcacccacctgatgatcgagggtggctcgcgtgtcatctcgtccttcttgacgtcgcccaagaacgtccttgacgtcgtcatcgtcaccgtcgcgccgacctttgtcggggaggatggtgtcggcgttctagcggtggtgagtgctcgcgtcgtcgaaacaatcttaggcagttgctgacccgacactcacctccgaacgatggcccttttcctcgaccctctgttgtctcctctcacgatcctttttagaaacccggcgagaacctgcccgagatggtcacgctggcgacgcggcagtttgggagcgacgccgtctttgcctgcaagccgcggcacgccgaccgcttctcatgactggtcggtaaccctcttccggcggccctatagatggctctccgatctcagaagtccctgcattcgattagtgtcgcagaagggagcagggccgtcgacttccctctgctgggcatggccctgtaactgcccggcgccgtaactgagcgtaaagtcgggccgcccgcggccgcttcgccctcttcgcctctcgtctcgcaccctccgaccttccgctcttcaacctctcctcgtcgttcgtacgtctctccgccacgcagactcttgtcggctgcaccagacacagcccggctgactcttgtcctccaatcccgctcgccgccagcctccttcttcgcccatcatgcccgctcccaaggccttcttccccaacctcttcggcatgcgcgcctaccctacgccggtctgtcctcctcttcctcaccgtctgctacctcccccgccaaagcctgccctagctcttggacttctgagcgggctttggctgtgggcgatccttctgccactttaagcaaagagctgacacccgcccgcctcttttcgctcgcctctaccctgtgcatcataccgtcctggctcggtcgtccatgcgcggtgttgctccgacttctcacccgaccgctcgtgctcgcgcccggactccactcatgctcctcgatccaacgctcggatgcgtcgcctgccttcgtcccaaccggttgcttgcggccggcgcttgcctgctcgcgtccatctcctgctctcgaccctgccgccgtcggctggcatcctgcgctctgccacatcacgaccctcccggatggacggcccccatcagatgtggaagccctacaagttcctcctcggcggcgccggcctcaccctctttatcatctcgaagctccaggacaccatggtcgcccgtgcgtcgcttcttctctcgttccttcgcagtgaggcgccaacggcgactgcaactcgcagaccggttctgcgagccacacttgccgcagctcccgctctggggcccctgcgaacgtccccctcgacgcgaatcgtctagacgaatcgtgactgcagagggagcaggaccctgtgcagagcggactcgagctgaccacctgtacctctcaccttgactcgcgtcgcatttctgcctctgcctcctcatgcgctccatcctcccgttttgcccgtccgcccgtgccttacctggctcgtcgtccgctagtcccggagaaccttgagaacgtacgtcccctgccgactctgccgaccctgccttgacgaaaagcgggcgcttcaaggctgatcattcatgctccctcgtctccctcgaccggctttgtgcagcccgagaacccgtaccgcaagcggatcctggccgagcaggccgctgccgcccaccactaagtacgcaggcgtgaggtcccgcccgagcagtcggtggaaggggttggcaggggatcatgtgtatagagatggaacgagggaacgatgcgaatggagcgaagcagaacgactcgtctcgccgtcgagctctgaggcgaagggtgtcaagggtctgagccggctggtagatgaaaagccgcggccgccgagcggtttcacctgcggcgggccttcgccttgcgcgcgcgcgcgcgcgcgcggtggcccgcctcgcccatctcgtttcgctggcgggcgggcaccatctcgccggtcgttttcagccctcaaccccaacaccctccccccatcatgccgcccctcgccactctcgcccgcacaggcgcctttgcctggggcacctctgccgcccatctccccatcctcgcgaccggcacggcctcgggcgcgctcgacgactcgttcgaccagggcggccggctcgagctctggagcgtctacggcaccgactcgtcgctgccgtcgccgtcggcagcactgacagaggcgcctcagagccccgtcgccgccaagaagaagtcgtccagaaaggagtcggtcgcagccggcgcagacctcgactttggcgaggagggcgacgacgaggacggcttcctggccgaggtcagcctgaccgggcacggcgaggccggcaagcgcgagcccgtccggagcttcaaggtcaagtcgaggtacgtccaggatcttggcttgcggccgcagcagacggctctcgtttgcagctgctgggcggcaccggctgagctcgacttaaagcggggcagctcgacgggcagacagctgagctagagatgggtctcactctggcctcgcctgctgcctgagccagctcgtggctagcttccgctatctcgtgtgtcgagggctccgcagcttcaatgctgacgatgtccaaaccctatgaatgcctcacaggtttagcaagctcgcctggtcggcgccaatcagcgggcgaccgcgcggtgtgctggcggcgggcatggaggatggcgagctcgtcgtctacgacccggagaagctcctcgcgggctccaggtgcgtcaacttcctcgttcaccgacatcatcggtgcgctgaccagtaacacctcgtcattccagccttgaggaggccaccatcttccagcagatcaagcacaaggggccgatccgtgcgctcgacttcagcctcggcaagaagcagctgctcgcctcgggctcatcggacggcgaggtcagcatcggctgctctcgtcttgatggctcacacggtcaattgactctgctcttcggctttcctttgcgaccctgccctgccagatcttcatctgggacacgacgacgctgagctcggcctcgacggcctactcacccggcccgatctccaagcccggcgacgtgacggcgctcgcatggaactgccagaaggagtttatcctcgcctcagccttgtcgaccggccataccatcatctgggacctgaggaccaagacgcagatcaagacgctcacttacgctgcacccgggctcggcggcggcggaccgggcggcaatggcggccgtggagcggtcagcagcgtctgctggcatcccgaagacgtgtgttgccttatgtccggcggctaactctgctgcgtcgaagctgacctcgtgcgctactcctgacttcagccgacgactatcatcaccgcctcggaggacgatgccgcgcccgtcatcatgctctggagcctccggaacgctctcgcgcctgaggcgatcctgtctggccatgacaagggcgtcctttcgctctcgtggtgccggcaggacccgaacctgctcctgtcgagcggcaaggacaatcgtacgatcctctggaacccgctgaccaaagagtttctgggcgaggtgcgtcttcctcgcttcctcgccgcccgtccctcgcgtcgactgaccagtcgcgctgcaccccgcagtaccccgtcaacaacaactggacgttccagacctcgttctatccgcgcaacccggacctctttgcgacggcctcgtttgacggcaaggtcaacgtcttctcactccaatcgtcaggctcgagcgaaggcagcagctcgtcgacggccgatcagacggccgaggccgaggacctgttcgacaacccggcgttcctcgcgtcgtcgacagacggtggcttctcgctgaagcagccgccgcgctggctccggcggccggtctcggccactttcggctttggcggcacgctcgcctcgacgtctaacctcgccgccgcgtcgggcaagcaccagagcgcgactgtccaccttcggacggtcgtcaccgagacggagctcatcgatcgagtccagaagctccagacggctaagcagtccaaggacggtctcagctcgctctgtgacgagcgctcgcgccttgctgaagcggccgagggcggtcgtgacgttgccggctggcgggccctgtcctcgctcttcaccgccaactcgcggtcggagctcgtcagtctgctcggcttttcccagcaagaggttgccgacaaggtcgctgttgctatcaacaagttcaagaaggaccacggcaaggacgactcgaacgttgcggtcgagccgccgtcgacggtcgtcacgtctgccgagggcgtcaccagcgagctcgccggtgagctcggcgttgcgacgctttctcttagcgaagagtcgactgtctcgggtggcgccgatgaggttgccggctccgaggccagcgccggcggcttctcggacgcgacaaagaaggctgagggcgagagcgagccgaccgagccgtcgagcagcctcttttctgacgaggaggtcggcacgcctcaaacggacgccgcgcccgactttttctcgtcgatgggcacgctccgctcggccttgccgtcgcacgtgctcgtgccgcaccagccgcagcgggccgagtcgtcggccgccgcgaccgtcggctctgcgccctcactcgctgcgtccgagaacctcaaggtggcgacgttcaaaatttacccgtctgacgagtccgaggtcgacaacctcatcacgcgtgcgctcgtcctcggcgactttgagtcggctgtctcgctttgcctgtcggccgagcgctttgccgacgccattctcctcgccgtccgaggcgggcccgagctcctggccaagacgcagaagacgtacttcgagcggcggaccgagagcctgccgtacttgcggctgttccagtcgatcgtgtcggacgacctgtcagacgtcgtccagaacgccgacctgtccgagtggcaggagatctttgtcgtcctctgtacgtttgccaaggccgacgaattcaacggcctggccgagcagctcggccagcggctcgagcatcagtaccgcgtcgcggcgacgagcgaggttgccgacttggccggccgggccaaggagtaccgccggcatgcgacgctctgcttcctcgcggccaagaagctcgagaaggtcgtcaacatttgggccgacgagatgaaggaggaggagaacgcgatcgagcaggcttcggccagccactcgcgatacgcggctcacgcccaggcgcttcagtcgttcatggaaaaggtcaccgtcttccagagcgcaaccgactacgtcgacaaggaactcgcctcgccaaccgagtccgaggccgttgccgactctggcgcgcggtcgtacaagctcgctagtctctacgagcgctactttgagtacgccgacctgcttgcgacccagggtctcgtccaggacgccgcccagtacattcagcttacaccggccgacttcaagctcgacggagacgcagccggaccgagcgcggcacgcgagcgcttcctcaccggtgcttccatctcgacggcaaccgccggtccctcgaccatcgctgtcgcggccccgtcgacctaccagcccgccggatcctcagtcgctgccgcctcggccaaccctgtttacgcgaatcaggcgcgcgcagcaccaccgccgccgcaggctccttcggctggcttcaagccgtcgcacaagagccgcaacgggcgcgcttcgatctcgatcgacggctcgagcccatttgtcgccgtctctgcgccaacgccgccggcgacgctgcctgcgccgcagactcagcagctttacacgccgtatcagccgaccaacgcctacggcaaccccgcctcgcagacgcagcctgcaggaagctatggcgctgggccctacggtcagcccgcgtacgctcagtctggtagcgtcagcgttcccccgccgccgcgtttggtcggcaccccaagctccgaccatctccctccgcccccactccctgctgcggcgcgccgtgacatccccggctggaacgacgcgccgccgaccaaggctggctcaaacatcgtccgaccgacgtcggccgctagcaaggttggcgcgatcacctcgccgttccccaactcgcccggcattgcccctccgcccatgtcgccgagcgtacatggccatgcgcaccagcagcagcagagcaacggcttcttcccgccgccccggggagcaagtacaaccctcgtcttcgtcgcgcatcacaaactagactgccgcgcactgttcgtctgctagacgtatcggatgcgcatgaacgaatgaaggactcgaattggcccgcggacgcgcgtccagtaaaagtgagagagctcgtcgcctcaccctcctgtattggatgctctccactacctgccctcgcacaatttttccatcaatcctttgcttgcgcaaacctgcgcgttgctttctatcggctccgaaggtccgccgattggccaaggcttcgcgcagggcagctggtaccgcgacaaggcccccatcctcgtgtacatcggcgccagctgctcgactccatccaggccgggaagctactcgacattgtccaacgctcggcgcttctgcagctcgacgagctccgcgaccaccttcttgccgccactggtttcgaggcctcaagctagcgcgtggcgccccttttttcaggctctggcggaatgtcttctagtctgctgattctctatcggcgcaccggcccggatgcagttagccgcacgatacggcgtgtgccgcaagaagctgaaccgtcgggcggcgtcggcgaacgagctcaagcgcgctcggcttggggccgtgtgaatcgaccagggctgccggtgcgtcggacttgctccatcactgagcactggtctgcatgcctgcccggttgccctttgtgtagtttcaaccaggtcgtcttcctggacgagtgtgaattcgatcagcacgacctcaaacggccatacagccacgccttcgtcgggcagcgcgccgtccagtccagtcagcagggatccggcgcgcactagcacgtcctgccggctatccatccgtggccactgcaaccaagatctcttcctacaccacggacgacctggtgtataatcctgagaccacccggagaagggtactggtaggtatactggtagcatactagtaggcgtactggtatttctgccggtatggtactgaagtcgatactggtaaggttaccaacatgcataccagtaccctagtaccctaccggtaggcattcgggcatcataccagtatggtccacccaaactttgatcgcctgccctgagcgcagaacaaaacggatgccagtcaaacgtggtgagtgtggccagaaaaatgtccgatggagtttcgaatggttcgctgttgaacgggcgaggaagttgaaaacatactggtactggtaggcctgctggtgtgctgccaggatggctactggtgtgctaccagtacatctaccgggcaatattcaggtatgtcctaggtcgtccgtggtgtagagttccttcaggagtgcgtcttcccttctacaatgccctttcccgctcgacgatcgctgctcgtgctcgacaacgtcgcataccacaaaacccaggcggtccgcgacgccattgttgcagacgagagggtgctgaatggctctcgtctcagtcgaagtgaggcgacggcaaggatgaggattgctgcaggagaggcaatcatgtcgagtgaatatccagactcgtgcgcgggagaaatcctcagacatcccaaaggagttgcgtaccgcgttgggcggcaccgccataggattcgtgaccaccttggcggcgtacgtttccggctgatcgggaccgttctcctgccgagaagcgtcgacggcccagctttagtcgccggctttgtagcgcgttcgggtcgagcgccggtcggctggtcctggtgccggcgaaggagaaagccgaggggcagcttcaagaagcagagggtccggtgatggcgaccgagcggagagatgtgcttcgggaattgttttgaaatgttgtcgggctcgttcaccgaggcacgatctttggagttgctgaacagatgccggctcgtcgcgcttgacgttctcgacctactctgagtgccatagccgaaaagaggttcgagtctcacatacgcccccttcctaccctagcataacatttatgtccgccaactcgagtcggcccgaatggttcgtcttgccgtgttcgaggaggaggacgagagtgacacactcgctgtagccctcctgctcgagggcgatggactggaagtcggtcatgtcggcttcatcggctccagtatgtgatcctgaggtcgcccggcacatgccctaccaggaccgtaccagtatgcccctgtatggtatggtacatgtcccgggtgagagactgttacgcattagctcgtcggctacctagcgatcgcgtcctggccattcactccactctcgctcttctcgacctattctccattgcgatcaagaacggcttctcgtttacatgaccgagtaccataatacttttgtcacggactgcgtgagggagggaggtcatgaagagagtgaccgtaccggacgcgccaatcggttgatctcgtgaattcgtcacttaaagcgaggccgccgaccaccccaattggaccttttggtcgcccgggcaggtggctaccatgctccgcatcgtcgtagattgacggcgggcaggcaacgaccgcggtacggctcctcatgtgcgtgatcctcttcaaccttagtcaacaaggttgatcagagactgaccctctgctcttcatctaacagtctcaccgctgatatacgacggtcaccaaggcgtgggccgcaacgcaaggcagggcaagcgcaagtcgacggcagtatgtgacttcttccagtcatcagcctccctttccaaatctgatcattctgcccctttctcagatagaaaaggagtggtgatatacttgaaaatgaccaagctctttgatgtggaggggggcgaggaggggagcccgtcgttgaagaaaacgtttagggcgcctacgtccaggtgcgtcgtgctcgggaacattgtcctcgtctgtcaggcaaagacgctaaccagcactagagggtggccatatactacctgactccaccaccgaaacgaaatgcaggcggtcatcgctgacaacgttgtaaccggtcgtcacgaggtcacgatcgcttccctatcgaatcgagctgcctccgcccctacctccccgctgcgtccgcttctacctccccgtcctcccacgcccatcgaccggctccttcgggggcctggacggcgattgagtttcgacctcgctctgacctctctcaaacaagactgacgacgacaacgaccttggcggttagcaaccttaaggcggaaacgccaagggagcgcggtcaaggttgagctcggcggcaaggccaaggcgcggcggccgctttacctgcccggtcgaaggagttgaccgcggctaacggcctccaagtctttaaagacagcctcaagccgcatagctcaatgatgagcgctcccatcaaatacgcttcggtcgacacataccttaatgtcatcaaacacgccctcacgcttgatcaacctcggctccacccacgagctccaaggggcttgctaacagctgaagactgacgacaaatatacggccgcgtatcttgactgcgccgaggacgagaatgaagagggccgcaaggttttgattgctcccgagcttgaccttgagcttgagggctctgagttggatcgagtggactaagtaccttgcatgccttgactcatcacgacagataaaaccgtattgagctgaccctaagccatccttttttgctgggcgactgcatagtctctatacatgcgccttgccagtttgcacctcgcagcttcgacttgagccttctcgcggttcgagcgaggaccagtcctgacgcggcgttcgcgtagtgagacagctcgttgtccattatgcgaagatgggtgaagcggtaaaatcagcaagacgaccgggcgccggctatcttacagtttactccccgcctcgctactggagcgatacaactttggccctgagactcgagtaaaatgcgcccgaaactaatgctatgctgtcaaagtatgtgagtcagagttcagacctcgattgcctcccgccgtcaaatcctccgcggctcgaccatatccattgctcagtcttttcaccgattgccaactcctccgtcacgatgtacttctacccacgcccctttctccacctggattttcttacctgctcgctattgcgagatgctgcggccgggtaagcgccctcgtagaaacgaccgagtccgcgcagcactcagcatcgttccgcgcctcgtctcaggccagtatcaaccgtctcgctaacccttccgctaactgccagtttcgacagctcgtacaatgagtgcgtggactcaaacttctctgaaggctgggggttttgtcttctggtggactgacaccctccctcctcaacctcctttccgcgggcaaggtgagtaaggctagtatgccctgctttcctttccctctcagacgatgagctgcagttttatcgaagggcggacagcaaaggtgcaggacatgcatcggttcaacgaaaaagcaagagcagggcgtgcacttacgttcacgccggcctcgaaacttctatagacccgcttgagcacctggtcgagacggagcgaccagaagtctctgcgcttggcctgtgtaggtgaaaatccggtttcagctcaatgatgtaagagtgaaaaagaagaagacatacgtaggtggcgagcggccgccagagctcgtgggagcactgaaactcgcagagccggaaaatagcgtaccacacctgcagggcctgaagaagtcaggacgagccaagagaaggcccatgctttggacggcctcctccttgtgcttgtcaggcctcccttcgtcttgttgcgaacactagctagcgactggtcttgaggcgcacgcgtcgatgggcgataaactcgccctcgacgaccgtctcctcgattgtgcaaggagcatccccgcgcttgggcggcaggtgtcaagtcaaccggtatctctttttttttttgcggtcggatgaacctgaaggcaacgacatcatcaagcggcagctgggccgtaggtgcaaggcgtattcggaacgagcgaatgtcaccgatccagtcagcaaataatgtcaccgatccagtcggcatctcccgtgatagactcgtacttcaggtgcaagacgggggcggtcagtcaggcattgctgcttttatagagggcggtataagcctcggccgtcactcttccgatgaaggacagacttacgtcgtacgggggaaaccgggcaaaagtccaccgctaagcatcaaaaattactgcctagcgcggctcgtcttccgtgtattaccggcagtgaagaaagcgttacagagtgaccgtgtggggaatcaacaagaagctggcgacttacctcgttgtccgcaacttccttctcggccattgtcgtctccgggtgcgcctcccggtcaccgcgttgaagccatgacagaatcactttccgattgcagatttgtcatcagtggggccataagtgacggtggaaaacggataatggaggcagcgactgatagttgtccaaatggaagtctcgacgtatgaaacgcattgatagcgcgtgcaatattcattcagcgacagataatgcagcaaaaggttgaatgtgcttggtacgccagagctaaagtcaaatatatagaaagcaatagtcacattacacggaggtccggccaatatagtatgaaggaacgaaagagattgatgatgaaaggcgggaaacagacatgggtgacaaaagcaacgttaggcacaatgatgatattatgccgccactcaaagatatttgcccgaatcgacgtgaagcagctcttcacagaccttctaatgtcagttggatacacgataaatatgatcaggaatacgcaaaacaaaccaataaaaacagaccaatttggaagcgcgggctgaagccgagaaactgggcgcggagagaaaggacaggcggctaactactgtctacgtgccacgcgggattgtttggcctttggtgtcagttcggagcgcaggcaagatttcatcaagaggggccaattctttgctccaaaggaccgacgagtaagctccttttgccttcgtccaggttaaaggtcgaacagtacaacggctcttcaagtcatagtttgaggcgcctttctaatgttcgccacataggcaaatgagcccaaagagcgtttcgatattacttgaaaacgttcagcattgaacgccaacaatattgtaggcttcgaggaccggaataaacagtgacaggagctttccgatgtctgaaggttggtgctcttggtaagttctatgaacaatcaacggcgccgtgattcatgtttttcaacgctccattgcaagagtcaagtggtacttgagatttgcaggtgtgagcatcgtaaataggaagcacgatagatagtacggagctcgtactgcaggcgtgcgcgtgatgattgtttggctggatgctggtcaaacgacgaagcgcttacatgaaagtgatttcacagcctaagcaacttgcgcaatactatttgctatgatcaaacggacttgaaatgcattcgagctcgccttcggagcgagcgtatgaccaccttgtgacacaatacaggttgaggtaaaggagttaaatgagcataagaggattgcttgctgcttgtaaatggttcacccagattgaggggaggacaatcagtacctggtggattaaatttttgatatgtatacaacgcaggctcgacaacgaactgcgtactctttggcgagtgaagtgctctggctcacaatatgcgtcagcgcgtgatgatgatgactacgactggaaatatccgtcatctgggcaatcgcctttgatcagcaccgagaaaaaggcacagcgtttgacgacaccaggctaaccctaaaagaaccaccccacccccaagatgagagtctgaggccacaccagctttgacgccatctttctttactttgatgcagaaaggaagagcaagtaagcagcaagcgctctatcaaagccgtcgccactttcatcaagaatgccacgtttactgcgaccatgctgactgaattggagcgtcggtcatatgcataacccgagctaaaccccgttcacgaagggaaaattgtgcgattaaatcatggtctgcacctgccagaacctgttcaatctattggaacattctcgtatctgacaagatctatctgacccactgaaaggttctcgcattccgaattagcagaccgttttctgtgaacgccattcttcaagaatatgcggatcaaaagatcggtgctcagagccagagagttagcattgcccctgcacaaaaatgacaaacttcaccaaagattgacggcagtaaatcctgattgagaaaaaaaatcaagttcgggctcttcatctctgtctcgtaagctacgagtagatggctaattgagcttcgggcttctcactcccaaaagttacgtcacacaaatgcacgaagacgcgttgcctgttccagagatggtaagtgctcgtgccaacgacaaaccgatgaaaatgccttttaccaccgaggttcaagcttgttcgtctcggcatgcatgcagacggcggaacgtcaaggcagcaggatggttgcatgcgtcggggggacggcgtcgagccggaccagggaggggcaactgggggaaattcctaatccgcctacggtcagcagaacacttcacattgactcaaaagattcagtgtctctcggctcggccccgcattatcatcgcagtaaccaacaaacgcacgctgctcagtggtttatgctcaaaaccaggttgactctgaagctgacgtgggtcacactgtctgatgaatcacaatgtctgataaacggtcttggtcgctggaacgtgcggaattcgatttgcagatggttttatatcttgttcgacaaggcgaagctcagctgatcgggtaagagttagggtttaatggggcatgcgatgggagcagagggtcagaggcgctatagacggtggtacattggaggcgagaaggagttcaagtggctaaggggcttcgcctagaaggcaaagaagcgagcacgggcacgaagcagagagagggagaggaggcgagagaagagaccatagcggggcataaggccccgccagtgagcaaagagggcaacagtcgaaggagaaagagttccaccgggtcagggttacggttcctgcagcatttaatagtgtaaggcagggtcaaggacaggcgggacgggcacagagacgaacggggtagggtcgggtcggctgcctagggggaaagtggacgaagaagggggtcgtcgagagggggaagagagaggcgagaggaaagctacggaagagggaagcgggcacacggaagcagagggtgaaggaagacggagcggaagagaggcggaagagataggagccggaagagaggcggaagagagaggagccaacaaggagaagggaaactgaaacagacgaaagcgggcggcgccgcggagcggaaaccggagaagcgcactagagccgggccagtcgcgaccgagccttgatgaggatgagcgagagcacccggacaaagtacgagtaggtcgaaggagcgagggactcgcgccagccgtcaagtagcttcaggccgccggactcgaccgcaccgccagagctgaggacaaaaggccggaagggagcagacacccggcgggcgtacttgagcgtcttggtgtgagctgcggccgagaggacgtccttgacagcgttgcgagaccggtcgacgacggagagcgaggtgtccgagtgcgcctgggtcgagagcgcgcgagcgtcttgtgaggcaagcgaaacgacggtgatgtcgagctccttgacgccgtcggggccggtgatacggaggtcggtccgaagctgggtgccgggcacgagcggctcgaggacaacacggtagcgtgagcaagatgagagggtgttgtgaatgagacgcttgacctgttcgtgtcgaccgagcgtgaccggagcgcggccggtgcaagcctcgtcgtggccgaacggagaggcctcgccacagtcgacacagaagtcgagtgggccagggcaaagcgtgcggtagtgaaggcccgaggcgacgtcagcgtccgacagctcgagactggatcgaaacggcacgataccgagccagcgacgaccgaggacggtggccgactcggagatggtgtcacgagctaggtcgggcagccgttggacggtgtgctcgagtcgggcgttgaaggccttgtcgcatcgcatgcgctgggtgacgaggggtcggtcgtcgtcgacgtcaagcagaaggaccggagcgagagcggcgtcggctgcatcagagctggccttgtacgcgagaggcgcgcactctgtgtgcgagagaacaccgagaccgccgagtcgggccggcagagtaacgaggtcggcgtccgttgcgaggcgtcgaggcgaagaccggatgagaagagccgagtcttttagggttcttttagggttagggttactgcagcatcgaatagtgtaaggcagggtcaaggacaggcgggacgggcacagagacgaacggggtagggtcgggtcggctgcctagggggaaagtggacggaggaggggggttgtcgagaggggaaagagagagacggagggacgaagtacggaagagggaagcgggcacacggaagcggagggtgaaggaagacggagcggaacagatgcggaagagagaggagccaatgaaagagaagagagaataaacgagcggcaggcgagcgcaagaggctagaccgaccgagcgaccggcatcttgaaccagacagaggccaaggccggatgatcagagtcgaccgagccgggcccgagcccggacgaggatgagagacagcatccgagtgaggtgcgagaaggacgacggggcaaggacctcccgccaggcgtgaagcagcttgagggtaccggactcgaccgcgccgccggacgagaggatgaagggaaggaagggaacggagacccggcctgcgtacttgagggtcttgctccgagcggccagaccgagggtgtcgtcgacggcgttccgggaccggagggcgaacgagagcgagaggtccgagtgagcgcgagcagagacggaccgagcgtcctgcgaggcgagcgagacgacggtgatgtcgatctcgcggacaccgtcgggaccggtgatgcgaaggtcggttcgaagctgagtgccggggacaagaggctcgagaacaacacgaaacttggcgtttgaggagagggtgttgttgatgagccgcttgacctgctcgtgtcgaccgagagcaaccggagcacgaccggagcaggcctcgtcgtgaccgaacggagcagcgtcgccacagtcggcgcagaagtcgagcgagccgggacagagcgtccggaagtgaagaccagaggcgacctcggcgtccgacagctcgagtaccgaccggaaagggacgacaccgagccaacgtcgaccgaggaccgtgccggactcgaagacggtgtcgcgctcgagaccagggagccgacggaggacacgttcgagccgagtgttgaaggccttgtcgcaccgggcccgctgggtgacaatggccttgtcgtcgtcgacctcgagtagaagggctggagcgagcgcccggtcggctgcctccgagccggatgcgaaggcgagcggagcgcactcggcgtgcgagaggacccctagaccaccgagacgagcaggcagggtgacaaggtcagcgtcggtgtcgagacgtcggggtgaggaccgaagaaggagggctgcgtcgacgagggccgcatcgaggtcgtcccagacaccgggcagatcgtctgtccgaagcgtgcgctggaggtgccgaagatcctgctggatgcagaaccgaagcagcagcaacgcatgctgagacttgaggtcgccaagtgaccgaaggagctcgatctgatggtcgaccttggcctggaggaaggaccgcctgaatgctggaccgccgacggccgtaccgagcagctcgagccccgagctgcaaatgtcggccagcgagtgtgacttggacttggcgacgttgagctgaagggacgagccgcgaccgtcgaagaagtcctgaacctcagccaaggcctggtcgtccggcgagaggacatagatgtcgtccaagtaggccagcagcagccggtccgggccgaggtgtcgaacgaggtcgtccagcgtccggcgaatggcgaccgagaagaagagcgggccgaacgggtcgccttgtcggaccccttgcgatgactccagtacgtcgaccgccccatcggcaccggtgacggcgagctgagcgggcgagccgtacatccagcgaccggcacggtagagagccggagcaaagtcacggagccctgcggcaaggtcgcgccggtcgacggcgttgaaggcgttggtgaagtcgagcgagacgaggtgggtgtaggtcttgggcaagtcgtctgcaagcgcccgttcgaccgctcggaccacaggctcgacgccaccctttgacccgacaccgagctggaccgggagaagcatgtctggcttgaagtagtgtcgaagcaagaccttggccaccagccggaacagaagctcgccgacagcgatcggccgaatgccgccatcggacttgatgagaggcgtcaaccgagaggcgcacaggagttggtggccgggtgctgagccttgagcgacgagaccggccaacaccgacacgaacgagaccacggccggccgacggagagcgaccgagagcaacggctgcgtccagcccgagatgccaggcgccgtgtcgagcttgaacttccggaagacctcgtcgacgatgtcggctttgggcgccatgcctggagcagggccggcggcggtggcaaaggggcgagcgggtccggtagggtgcttgcgcttgagctcggctgagacgtccgaggtgagaggagcgaccttggccgaaccggccagcagacgagcggcacgggagagacgaccggaggtgacctgcttggcgacggcctcggagatcgtgacgggaggacggacaccccggtcggcgttggatggcgtctcgggccaagcaacaacagggaaggctgccaaccgctgcttgaggtcgacttcagctcgacggccagggacgaggccgaccttgggcaggcaaaggaagtcgaacagcgtctcgtccgatggcttggcgacgaaagcagaggccaggcgttcggcggcatcggcgaagaggcgagcctgtgagccgatgaggggcttgacggccgtcggcagcttgacgagggacatgaaccggtcgagaaggtcgtcgacaggggccaaagagtcgtcgtcggagggctcgaaggtcggaggacaggccgaggtcggaggagccggggcaaggaccggagcagggtcaccgcgctcagactcggaccacgagctgaaggaccagtcggccggcgtcggaggagcggaagaccgacgaaggcgacggaccggcgtgagctcgtcctcggacaacagcaactcgaactccgaggtggcggcagcagcgttggagacagacgaccgacggactggagttgacggagctcggagcagagctggagttcgagccggagctggggcggacgtggtggtgacgacgggggcaaccgatggagctcgacgggacacgggacgggccggagcggaggtgctggcgtgtcgttgatgaagaccgacgcaccggaccttgccctggtgagacttgaggccgtggtccgaccgggcgacggcgccgcaagggcaggcgagaagggtcgtgcctcggaggtcggaggaggaccagttgatgtccttgtgccgcttgaccagatgatcccagaggtcggcgtactcgacgcgacacctcgggcaacggccacgggtgctggccatggctggcgaggcttggccgacggatccgaccgtacccctgtggcaaacgagctccgaacccgaagagggttagggtcgggtcgggttgcctggtgtagggtgtaacgggcatgcaatgacaaaggcgggtctatggacgggaggcgaggagtttgagagttagacgaggggaggagacggaagcagaggaagggagcgcaacttagaaggcgaaaaagcgagcacgcgcccggagaagtgagagggagaggaggcgggagaagagaccgtacgacggcatgagggcgcgccagtggtcgaagagggggacagaggcgggggagagggtgccggcggtagagagaacgagagggaagaaaggggtggcggtgcgaccgaggtacttggaccgcttcgagccagccctcgacgaggtgcgtcagcgtcgacgactcgttggcgtcctttttgttcgactctttgacgacggcctcgggctcggcgtgcttggccgcggagatctcgagccgggcaagtactacaagtagccgctcgatcccgccgaggcatcgcccctctgctcgcccgttttcgacgaggcacacctctttcatagtcgggcctcggcgccgacggctgaagacaccgtgttgccttggctgccgctcaaagagcctccgtcgcaggtcgccacacgccgcctctgcgcctcaccatctgacgccgtcgcggtcagcaacgaggcgctctcctctcttctgcttcacacccgcaccgtcctgccactcctgcactctcatgaaacccttgttgtagctgcgtttgtcctcttcgaatgtatgtcggcctgcggcaaagggcgtttgtgagcggctctgcttcgattgtgccctctcgcatcgccgttgctctactggcacggcaggcaccctcgaggacgacactcacctcctgtcccgggctgacaatcttcgcttctgcacttcgccctgccgctcttggtctggcaagcaggcactgctccaggcctcgagctcgccagaattctggtcgccgctcgagagggctcgtcaacaggtcgaccgcatcgagcccctttcttttcctgaagctcgagcacgtgaagacgagacgcgactccttcccttgctcaacggccgatcctccttcggcccaccagcacccatcctatcgtcttcttgtccctcagccctagtaccccgacccccccacacgcaccctggctcgacgccttcccttcccagccagccgccctctcgcgccgcacctccggcgaccatgagtttggccttccctccccgatccaggcttgccgccacctcgaccagcagcaacggcaacggtccatctcgttccggccgtttccgtgccgttcttcgacgcgtcagcttgaaggcggtcagcgctacgcggcacgcacggaaaagctcatcgtgcgcaccgacagccgagctcttcgacagcgcccttccgagctcggtcctgtctagcgaggctgcctctttgtcagctgccttggtgagtgagcattcgtctctccttcgacagaccctcggctgacgatactggagaagcagccagcggctcgtcctcagccgcctgcagcttacgcagtacgaacggtcgcacttgtcgtcggcacgccccctccgcgacactcttccgtcctcgacgggccatcaatctcccccctgtcccttccgtcaatgacctcgagccgaagctcccggctcgacttccaatcgctcctcgactgggccgagtcctcaagcgacacctttctcgacggcgacctctcagtctcctccatctcgaccgactccgtctcgtcgacgactcccacaacgccctcggtaacgccacccaagcgacccgtcacatcgccgcctcggtacaaccttgccgctgccttcgagcacgtcgactcatccacaagccccggtcgtctgccggcgcggtatgacgccctctcggccttcactcctccacaacgcgtccccgctctcaagcccacccgcaggtcagccttcgtagtccacttttgtgacactctcgagcccgtcataccgtcaccagggacgtcgctcgccatcggcctgcctgtccttcttcggctcccaaccgacgcccggccgactcgcctcgtccgcgctttcgcgcgctacatcggcacgctcgtcggcgagtcaggcgcttgggtcgggctcgagctcgcaacgtcagccgtcagcagcgagacgggcctcctcctacagatgcttgacggcgccgtcgtgcatggcgttcgctactttgacgtcaccgactcgtccgacgactggtcgggctcgcgctcgagacgggaccggcaccatcgccggcgcatgagcaggacggccgtcggcggcagcggtcgatgcctctttgtccggccacaacgtgtcgcctgggtcaaggacgccaagtgacgaccatgccgcaaggcttcatcgtctcatccctcttgccagcctggactccctttccaccctcatattgcacttgtcggccctttgtcggcccatccacccatcgatgcgcgctcctttcaactgcgcgccacccttgcgcgggctcaatcggcggcgacatggcgggcggccgcgaggagggtcgtgagggtgctggctggctggtcggagggaagggacgcacgtcgctcctgctgggcggacgacgctcttccctctcgcccacgcgcgcgcggttggcgggccggctgcttctggcgaaaccacagtgagtgacgccgagcccctttctcgtgctcaagagctgggtctcgcaaagtcgcccgagcgaacgccatctagatcaagaggccgtagagggcccggccgccgctgatgccagcgacgacggcgaggacaccgacactaacggttaccgcgaccatttccccaatcatcgcccagtactgcttgccaagccgtcgggcgccctcgaggtcgcgactgaccgtctcttcctcgcgagcggccgccgacagatggccctcggcgtcacgcggtcgaaagagcgagcggcgaagcgagagctgcatcttgagcatccggccgagcgcctccttgatgacgtcgcgacggagcgcacgccagcgcggcgacgggtaccagtcggagaaccaagacggatagacgagtaggaagacggagagttgctgttgagcgcgggaaggcatgtcagccgttgaagcgacgtgtgaacgacgtctctgccgccaggacgcaccagctttgcccgcgtcttccacgtcccgtgcgagaggccgagatagtcggccatggcatctccgacgagtatccgcgtcaggccttcatggtgggcgagcgacgtccgaatcggcggctggtccgagatggccgccaggacgggcagcgtcggcggtggcagggtcggatgcgggccgtcaaagactgggcaggctgatggcggctcatcattgtagagcgtcacgggctttgctgaagcgccggctagaggtggcggggcgcctgaaggtgggaagagatcgacgacgatgctggccagcaagctgcccgctgttagatagctcgaaaagtgggagcgcaagatgtcctctggaactcctaagtgaaagccaatgtgtctattggagggaaccggtcagggcctgccggaagggttgcgacggtcaagacaaagggcgcacctccacagccggatgtatgaccgccggccagcgccctcggcgtcggccgtcaggaccggcccgaccgcaccgagccgctcgagacaccagagcggggcaatggcaaaggaagcgagcgtgccgatcatgtcctcttggttgagagcgacgtcgtctttgccctcgccctccgaacgcgccagcttctgggcgacccgccgccgagcgatggcgtgcaggagccggacgcgcacagacgcctgccaggcttcgcccgacccggtaaggacgaatgagcctggcgcgggcggggagagcgactctgggccgagcgagagccgggtcgcgacatagtgcttctccttctcgggtgcatccttcggaatgctgtgcctagaggggaccagagaatatgggagttcagccgcagtatgcgcaactcgagactggcgcaagccgctcgggcgtacgggcagcccatgacgtcgagcacgtattgcccggtctcggccaagcggccgcgtgtccgctcgcgcgaagcatcagtcatcgggcagtaggcgaggccagtcttgtcgactggagggatcagatacgacgccgcatggaggtgccgggtgattcggggactgcgcgcgcagagggagggtgtgctctcgtcgcgtcagcctaccgcacgatcgcgcaggacgactgtatgcatgagcagggacgcacgccgagaagccgccggcgagcgagaagtggaggaggctcgtaaaaatgagtccggctgcgagagggaggacgcaaggggtggaacgtcagcgctcttcgtcgatcgagaactccgatcccgagcagctggcggaggtggtggcaaaggcgcaccgttctcccaaaagtagccgctgccggtcgcccattcgtcggcgtcgacgctgataccctcaggtgctggccgggcgacctcgttccaacaggcaagcgcctcggcatcccctcgctcggcagcagtcgcaagggcggcgagcgtgtcgtggtgagcgagctcgtcggactcgaggctctcgatccagcggtcgatgacgggatcggcgacatgggcgtacctagagagaccggctcaagggtaagctgaaggagagctcatcaggcgctcatgtagagctcggggacgcaccgatcgagctcagagtgggagagcgagtgctctgtccactggaatcgatgcgaccaggcttcgacgacctcgcccttgcggaggctgtcggtctcgatcggatcagagagcgtcttgacctgccgtcgagcgtggtccttaggtaaagggtggatgaggaagaccatctttgtctacgttctagctgctgagaaaggacgaggaggtagtcggagggacgaagggtcgtgggctgaaagctcgaaggtggtgcgtgcgcagcagcttgcagcgacagtcgatcgagcaggggcggaaaactccgacacaacgccactcgcccggtctgccactctaaagtctctctgccagggtattttgaagtgcatgaagaagaaggggtgcgatctagaggacgagaaggaagggccaaagagacagaaggagaccaggaagggaggggcaagggggcacagacgcgcgcgcgccttaccagcgtccaccacctcctccgccgccgtctggaaggaagagggagcgctctggtaagtgacagggcctgaaatggatgagagcaggagggaagacgcacagcctccgccgccaccgtagccgccgccgtctgcagtaaatgagagagcgaggtcagcgccgatacgaccagaagaacaaaggcaggacaactcacagcctccaccgccacctcctccgccgcgaccgccacggcctccgcctccgccacggtagccgccaccgccacctccgccccggccgccatagctgcccatctcctcgagctctggcggaacctcggagcccgattcacgcagaatcccaatgagctcccgggctgattgagtgcagaacgggtcagcgacaggtcttgacacgctaagagagagagaaggccgcaccgttcttgctgttgtcggtcgtgaagtaggtgtacgacgttccggtcgcgccaccacggccagtacggccgatccggtggatgtagtcctcgcagttgttggggaagtcgtagttgatgacgtacttgatgtccttgacgtcaagaccacgcgaggcaacgtcggtcgcaatcatgatcggcgaccggcccgacttgaattcctgaaggacccagtcacgctcctgctgctgcttgtcgccgtggatggcgagcgccggccagccgctgcgaaagagaagtcacgtcagtcagagtctgacgttgccctgtgatggccagtcggagtggggacgcactcctgccgcagatacttggtgagctcgtccgcgacacgcttcgtcgccgtgaagatgatgaccttgccgttctcctgcgagatctggtcgaggtgcttgacgagcttgccgcgcttgtcaaagttggtgcagacgtcaacaatctgggcgacgcggtggttggccgagagctcggccgagccaatgttgatctggatgttgtcctggaggaagtcggcggcgagccgctggacctccttcggccaggtggccgaaaagaggagcgtctggcggtcaggccggatctgctggacgaccttgcgaatttggggctcgaagcccatgtcgagcatgcggtcctgtgggagagacaaagaggctcagcttgaagtcggagacgagcgtcgcgatgcgggcaaaggggaacgcacagcctcgtccatgacgaggtaggtgacgcgcttgagcgagatcttgcccgactcaagcatgtcaatcagccggccgggcgtcgcgacgacaatctcggcaccgcgctggaggtcgcggatctggccgcccttgggcgcgccgccgtagacggccgtgttgcgaatccggctcgatttgccgaatttggtgcattcggcttggatctggaccgcgagctcacgcgtcggggcaaggatcaggcaaatggggccgtcaccgggggcgaggagaggctgggcgttgatgtggaccctgaggtcgaggaaaggcgagagcgaggattagcaaacagaagaaggcgggacgcaacgtgacgacgcacatggcgggcagggcaaaggcaatcgtctttccggaaccggtctcggcgacggcgaccatgtcgcggccggagagagccatcggccaagcctggcactgaatcggcgacggcgacgggaagttcatggcgaggatctcctgaaggatgtagggcgggaagccggcctcctggaaggtcgtgatcggcttcttgacgtcccggccctgaacgaccatctggtgggccgaccggtaggccgtcacctcggcctcggaccgggcagagaccgccgggtcctcgatgtagaagttcttctcgagcttgggcatcgaggcgaggtcccatgtggccttgccgaggccggagccgagctggcccatgcggtcaccgccgcctccgcctaaagcaagcacgagaggtcaaaggagacgcaaaagggtcagcgggagagtcctcgaggaggcacggtgccactgcgctgctagctactcaccgccgccgtagcctccgccgccgccaccgtatccgccgccaccgccgccgccgtagccaccaccgccaccgccgccgtctgtgtcagccgagagagtagaaggaggaagggtcagcgattttgccagcgcgagagctgctctgatgcggctcccgactagagaggcttgctagaaggggaccgacagccaccgccgccgccgccgtagccgccgccaccgccgccgtctagggcgcacgcgcaggggacaagaggagagagatcaaggagtcagcccagctgcttgtttaaggcccggctgggcgaggatagcccaaagggttgggtaggctgagcttcggagggaggatggaagaactcacagccgcctccgccgcctccgtagccgccgccgtaagacatgacgagctttttgagtgtttgttgttgagaagggagagagagagagagagcgtgagagagtccaagagcagagggaaccgagaccgagaaagggagggatgagagggagggagaggatgttgtcggaacagaaggaggtgcgcaggcttcgtcgaatctggcagaggcgcagcgtttctcgcccggcggggaaaatgtgcggcgcgcgccccgtaaactcgggccgcagaggacgttacgctgggcgtaactcaacccaaccaggcgacgaacgacaggcgtcgagatgcaccgggagggcctctcgccaggcctctcgaggaatagaggcttcatccaagataaggcaaggctcaatcttcaggcgttgtcgcccgcagttccacgcactcgcggtgcggcaggctaagcgactagtctgacgcacatggatgcaacgcattccacaaagtacaagaggagggaggaataagtgtcgtgaagcaagaggagggtagaaacgtcgtgaagaatgcaccggagacattaatggggtcaaagaaggatctcgaggggcgagcggcgtgggcagtgaagcgaacagtgatggaatgacccgcggcgcaccgcccctcgacaaaggaggcggtctggtaaccccggccgctcttcaatggtttgagacgctcacgagcacgatgaagaggacggcaaacgcgagcatcgcgatgacaaagacggtggcaatgaagcactgggcggtggcggtggcggtggcggtggcggctagagatcgtggttggtgaaggatgagaagggagagaggagggaggcaattaacagtatcagtctgaggatcgagcgagaaggcgaaggtgcaattgtgcgccagcgggagtcgactccaaaggaaatggagcagcaggaacgtaccctcgtggaggaaccggatgtcggcctccgtcggctcaatctcgaccataatgaccgtcggccactccctcgagtcctgcgcaaacgcctcgacgagcccattccagacgcccgcgagcgcgctgagcccaccgccagtgctgctgctgctgctgttgtcgacaagcagccccgccgccggatgccggcgcgtcggcacaggcgcaaacatggcgtcgaaccagtctggtgagagccggacagcggccccctcgcctgcaggcaagccgtgctggtggtgggcggggatcgagaggaggatgcgcgaggaggggacgggggcgagcgcggtcgggaaggcgcggcgaaccatacagagcgcctcctgtcggggcaggcgggccaacagaggtagagagaggaagagagcgtcagcgagagcattcgcccagagtcctctcttcagtgtccttcggacgagaggacggacctcgtgcgacctcccgagcacacccgcacagtcggccgccagatggccgaggctcgccggcggcttgagccggtacgtcacgcgatgcctgacctcgtccggcgtccatgccagcgcctccgggatcggatacatcacctgctcccgctgctgacggtcttcgtaggccgcctcccctgttgccgaggaggagggcgtcagagcgaccgggaggagcgggcccgactcgagcgagcaagaggcgtcgaacgagtcgcgctgcgggaccttctcgtagtaggccggaggggcgacgacggagcggccggcagtcatctacaggcaggcagcaagccactggtcagcgtaaagtcgccgggaagatgctggagagcaacgcactgtaggggagggtggtggtggtcgaggaggaggagacgaaccggcgctcgctcgcttcagcgctcactcgcttcacttcgaggggcggccggctgcgcaccacagcagaagctcggcacggccggcgacggcaggaggtaatgacctctcgttcgtgccctcagtaaggacactgagccaagcgacctgctagcagcctgcctgagccggtctcccaagagctcgatgagggcgtctagatagaagcattggttgactggcgtcggccgacgaacccgtcgctgcccgcctgcgccgcgcgtcgcccgtcgtcgtcagagtcgccccggcccgatcgaggttgggctctcctcccttggcccctcgcactctacgatccagacctcgaggcaagcaagccaacgacgcaaagtcgcccctgaccctctcctatcgacccgcccggccagctctctgtgcgtgtccctgccttgccctctgacgacccggttcaacgaggctttgatctccagtctcgcgcgcggtgacgcaagtcgggccagcctgggctcactccctcctcgccctgctgccctgctgcttccgacctccgccttccggctgcaggacgctcctgaccgcaacaccgaccagcagagtcctcctcatcgcataaagcatcgcagccaggtgcgtcctccctcgcgactcgctcagcttcgagctattcctatgatgcgcgcctttccccgtctcaccgagcctgctagcccgcccgtcctgcaactgactctccgtcaacaccggacgaccgccagctcgtcgcttcgcttgagctcccaagccagctggttcctcccttcccacgtccttccgcgatggcctaccgacacagccatccgccgttccatatccccgaggcggccctgcgagcgacgaacggcggcgccggcactaacggcggtctcggtcctcacccgccgtcgtcctcgagctcccatcagcagcagcaggctccgccgccgcttccttcgccagactactactcgtacttgatccagacgccagacgggctcggcggccagccgacgcccgggagtgcgctcggcggtagcggtggcgggggagcggccagcgacgagtaccggcagcagagggaggcctgggcagcggcggccgatgcaagaggcggctggaatccgggcatgttcaacgcgccgccgggcgagaatgtcagtcaggtgcgtctcgccgcggaaggtgagctcttgatagcttccggtctgacccgctcttcatctcggtgtcttggcagctgccgaccttccttcagccgccctcgctcggcgacatcaaccggagcacgctctcagccgatgtctcggccgcccaccgggccgtcgacgagtggaatcttgcgagctttgcggccggcgccgctggcgtccgactctcgcccggcgaggggttcggcggcgccgactggggctggggagggagcgacgcgccctttccctcgcccggaggcgctgcctcccggccgacgctcgacagccaagagtcattccgtgcggccgcggcctttgtcggcgggagctttccctcggccggcgtcgtcgacgacgagatggacggcggcgacgggccgttctcgctcattccctcgccggcgtcggccccgctgccgtcgtttgacgacgagccgctgatgccgcagcccagtcggtcgctctcggacccgctcccaccgacaggtccaatgatggcggcgagtcgctcgccggtcaacccgacgccgtcgtccgcgctcgactcgagcagagcctcgtccggcccaggctccctcccgtcctccgcactctccctgacgacgccaggcgtccagcagcagcagcgccagcagcaagccggtccgacgaccggcgccagcagcaactcgacaacgacattccagggcgtcggtgccggccccgacggccggcagatgcccggcctctactcatcgtccgggttcgacgtcctcggcgtcctctcgcgcgtcattgcccacccaacggctcagcagctgctcgggcccgtcgactttagctgctcattcatcgtcgtcgacgtcacaaagaatgacttcccgatcgcctatgcgagtccgtcgttctcggtcctgaccggctatgacaataaggacattgtcggccgcaactgccgcttcctccagggtgcgtctcgcccagcgacgctacctcacggccgtgctgacgaggtgtgcctctgcagcccccggcggcgacgtccagaagggtgagctccgcaagtacaccgacaatgtcgccgtctcgcacctccacgaccgcttcagccggcgccaagagtgccaggcctcgctcatcaactacaagcggggcggcacgcccttcctcaacctcgtcacgatcgtccccatctcgcactggcattctgacgaggtcgagtttctcgtcggcttccaggtcgacctcgttcaggcgcccaacgcaatcctcgcgagcatgcaggacggaacctaccaggtctcgtaccaggtcctccagaacgtctcgcgcccgctccctccggccgggagggcgttgggcccgccgaggcgcgtccggaagcgccgcgagctgacggccgagatgcgcgacgtcgtcgagagcagcgggcgcgagtcggccgctgctgtgattcgcaaactcgaccggggcgcgctcgagaaacacgacaaggccgtcatgggcgagtggtacaagactctggccgagcacacggacggtgtgtttcttgcggcctcctcgacctgccgccactgcaacgtgcctgctgacacgcgtatgcttctgcgctttagactttgctcatgtgctctcgctcaagggccaatttctctacgcctcgccgtttgtccgcaacgtcctcggctatgaggccgaggagcttcagggcaagtttatcggcgacttttgccacccgtccgacattgtgtcggtcatgcgcgagctcaaagaggcgacccaggcggcgccgtacggccagagtgtcaagacggtcaactacctctgccgggtcgagcgcaaggtcggcggctacctctggctcgagtgcacaggtcgcctgcacgtcgagcctggaaagggccgcaaagtcgtcgtcctcacgggccgcgagcgggttctgccacggctcgagtgggccgcgatcggcggggcgggcgggcttggcccactcagccagtccgagggctggggaatgctttcgaacgaaggcctcatcctctacgcctcggccgagctccaagcgatctttggcgcgcgctcggcgagccagctgctcggcgactcgctcttcgagcacgtccctgcgccgctcgggccacagccgagggcaacgacaatgtcgccctcgcagctccagccgtcagctgacgacgccgcgcacggcaagatcaaggaggcgctcgcgatggcctcgcgcggcctgccgaagaacagcggcctcaccgtccggcactcgatcctcctccctgccgcctcgcacacgatcaccagcagcggcctctcgtccggcggcgccgcggggagacactcgtccggcgcatcgtcgtcccggacaggcggtggcggcggatcaagcggcggtcggccgctaatggtcctgcacgaggtgtcgacgacgttttatgccgtccacctcgacgcgccttggcccgacccgcgcgcggtcgaacgctcgtcgaccgacggctcggcgacgccagagtccaagaccgaaggcggcggagggagccgcagcggaggcggcggtggcggtggcagaaccggcaacaacggtagcggcgctggaggagacggctgggcctcgtcgcccatcggctcgcccgagaccgactcgttcccgctcgaagagcgccaagggccgagccagcggcggagcaagccccctccgatcgtcttccaagtcaaggtcctccgcccgacctcctcctccagcagcagccccacctcgcccttgccgacagtggccgggaaggccccgctcgccgccgccgccgccaacgccgacgtctttgcggaaatttcgctccaacgcgagagctcgtgggtgtacgagctccagcaactgaagcgggcgaacggccggctgcggaaggagctcgctgcggtccgtgctggccggcaggcggggtcgggaggaggagggaagggcgagagcgcgggggggaatggtgagactcgacaggaggagactgagggtgtacttacgcatggttgatgatggatgatgggtggtggacaggaaggaggggaggccaggccaggccagacgaccaagttccattggccgccggcgcgcccggtgaccctgttcaccgaccctacttctactttaaacctcgacgacgcccctcgctctcactgattgttcaacctgctccattggtaaagctaggttcagacgtcaaagaccttgtagcgtgcctggtagccaagcgcccagccgatccatcgtgctgaatagaggtagcaagcgttagccaagtcaacccttagacactgcagtgctttcgcagacaagcggcgtacctgcgatgcccaagatgaggcccagattcaggggcggctcggccaagtagacgtcggccttttgtcaaagaagcgagtacggtcaattcatgcagttctcggcacaaagaggcccgtcacgtgaaggactgaccgagtcgaggaacacaagcatttggagtgggttgggctgcgcctttgcgacatggcacgagttgaggtatcccatgaacgatttgagaaagctttcctcgaacctgagagtgggatcagatgacaagtcagtggccgctgacaaacgacaacgggtagcgaacctgctgaccggccctccgtgacgccgatgtcgacgactaggtcctcgcccgcgctcgcatctggccaaaaggtgtgcggatgccccctgcggaagagacgacgcgacagtcagtggatgccgactacttgcagccaggggatcaggtacgtacggcgccatcgtctgaccctcgccgacttgaacggtgccctcgacgccgtcgtagaggtaccgcattcggcccttcttctgcgggcggttgcgcagccaatcgaagcggtaagttagctgaacgatagctggcgagatgagtctcgggctggctacgcaacgacgtggaagacctcggtctggtagcggtgccagtgtagcggcggcgtcgtcagagccgtgcgcgagttgctgagctcgctcgagtgcgagacgatgtgcgtcatcgtgtagagtccggtttctgggtcgaaccgttcggggaggagcgtcagggcaccgtccatgtaggacgtcccgcccggatggacggtcgacgggctcggggcgatgagcttgggctgtcagggcgggaggcgcgggtgacgggcgatcagccggggtgctccgggcttagctgagttcggctgctcccatcaggacgagcgaggcgtaccatgttgtagcagcggtcgatagatattagctgctcgtaggatcagctagggaggataaaggtcaggaggcagcgagcaagctgacttgggctgcccgctttcgagcggctgcgcgggccgaagccgccgtctgctcgacctcgtgtcgtctctcccacgtcgacacccaccacgccgtatcggctctcatttagcatggtcagtccgcgtcttgtaatctgcccagcgactgggatgctgactggaagatacgcctcgccgcttacctgcctaccagtctgtcgcccgctcgagctcatacccggcgctgctgcgccgccagtcgtcgacgagggtgcgcccgaccgccctcgccgtttgtctttgcgcgaccggcgtcggctggggctgacctagcattccggttgttgttgtcggactggaccagaagttacaggccctgagacgcaggaggacggcggttgagccgcccggcgtcctccgacgggccgtttcaagcatcgctcggctcgttcgccctccccacccagcatcggtccactccaccccttcagtcagcgcgcttgaagctgctgagaaggtctccgtagatccgtcaaatctgaacggcgccggtccgctcgtcgttccggtaaaaaccgacgcgacacctcggccggcgacgacgcatacacccctcctcgtcaaggccgcgccggttgaggatgtcgctgagcccctcagcgacgccgccagcctgccaacgtcgagcaaggtcagaattagatcgcgctgaacagttctttgcatgttcgctaatccaacctagcccacccaccaggcgctcccctccaaccctggaatgacggagcctttgtcgcccgatgccgcgcagccatccggcgcatcgccacctgtcgcaggatcccagaagcggccatcttcgcaagactcggacgctcatgatggatcatctgtcaagcggcgcaaggtctcgatccttcaggtaaatcagccgcgtcggccggccggccgctcctgcgctcgtattgccgctgaccctcggtcacccgttaccgtacagccggcgacgccgcaggcgaccgatgcgctgcgacgcaagttcaagtgcccgtcgctccttccgaagccgcccgtggctgtcgtcgtcggctcgaccccggacgacacggccgacgccaagctgtccggctcctcgtttggatcgagcgagccgccgtcgtcgcccgtcctggctcccaaggtaaagatgcggccgagcaagttcaagccgctcacgctccggccgccaccagtggtatctgtcgtccaagctgagctcaccgaccggctcaccgcgatcgaacctgtcgcgccgcgggttacgccggcagcgatcgttccgactcctgctggcgggtcgagcaagaagccccagcccttcgtctcgcccgtcgtcggctccttgatggccaagacaccggccgccgactcgcctgcgctccagcgccgagtgcagctcctcaagcaggccgtgcagctgctcaagcccgaaggccggcagcaggaggatcgtctcggcgagtcgcttgcacgctggaaggctgctgggagggaggtcgcacggctgctctgggaccacgggctgtccgagtcacccgttccgaaggcagacgaccggctctcgatggcatcgccttgggccgacggcggcttcgacagccactccgtcgaccgagaaagcagcggactgagttgcgggcccacgcttgaccctgcacatgcttgcgatacggttgacgtccgacgtgaagccgacgacagccggtccggccgggaagcacaagcgccagaggagtggacgatgggcgcaatgctgcgcaccgttctgaggactgaccccggcctttgtgagtccacccttctgggtctaaggtagttgaagtctgacgccccgctgtgactccgtgcagtcggctggagcgacgaggacggcgactgggtggccgactgatgcgagtcgcgccttaaaccgcgtcatcaactctcatgcgatctccaagatatcctctactgcgacttgcgcttctcgatggcgtcgtcgacggccgcccggagactcttgatgacctctcccgagctcttggcgccaaagatggccgagccggcgacaatgacgttcgagccggcatgagcacactccgcaaccgttgccgggccgacgccgccgtcgacctggatgttgatggtcggatagagttcgcgcagcttggcgacctgaaaggtgggcgcgaggtgggctggttcagctgcgcctcgctgaagccacgatgagcaaagacgcaccttgggcatgcactcgggcatgaacttctgcccgcccttgcctggaggggtgaagaccgcaacgtcagcagagatctcggcgcaagcaggcacagtaaagacagacttaccggggatgacggtcatgatgagaatcatgtcgagcgcgtcggcaatctcctttgagacgacctcggccggcgtgtcgggactgagcgccatcgaggccgccatgccggccgccttgatctgcttgatgagcgcgagcgggtcctctgcgcgacgaagcgccagagaaggtcagcatcaaggacggtctggggagcttctacacgcactcgtggcctcgtagtggaacgtgtacgacttgccgccggcggcagcaatctcctcgacgtactgtggccgtcgagagggtgcaggcggatcagctgcctattgctcgcgctggtcaacgtagccggcgacggacctgctccggcttggcgaccatcatgtggcagtccatatagatgcccgggacgcccttgaagacggacgcgaggacaggtgcgcctgagaagcgcgatcacggagtcgaaggcgtgggatggtcagcgttcgaccgtcgttgcgcaggtaggtcggtcgctggcaagcgagctcggtcggagctcaccaaggcaaacgctctggacaaaggagccgtccatgacctgggaggttcgaaagatgaacaggcgtcagctgaaacacttgcggcacgaagggagctcctgaggtcggccaaagagcgacgtacgtctgctcggcagaagatggagaggtcagacgacgtcagctgccgccctcaacgaggaagctacgagcccgcgcgcacccatgtgcagccagtcggcaccctcgtccatgacacgcttgcactcgtggctgaggttgcccatgtcggacgcaaggaccgacggagcgatgatgctgcgtgtgggcgaagcagcggcgcgtggggaggtcgacgccggtcagcccactgagctctggaggggcgctctacgctcgccagctcgcacaaacgcacctgcggagacacatgactagaagaaggaggaggaacaggaggcggagagagacttcagagagcggctaagggaggaggtcgacgtcgtcaggggaagaggaggtgatgcgcacgccggccttcgacgcgcttcggaggggccgcgcagcagaacccggccgacgacagggagcactctcacgaaaggtgcacgctctgagaagggttcacacatgacagaggcaatcggagacaacgagaacgagatacagcgaggagatgcgagggaactggcgagcgaggagggcaagggtatcggaggcgcgagcgggcttgacgggctagaagcctcggtacccgccctgttgctgctgctgctggccgtaagggttgaaacctgtctgctgctgaggcatgaagcccgtcggttggggacccatgaagctcggctgcatcggcatcccggtcggcatctgctgctgcatcgggaagcctgcggggtcgagcaatgaagcgacagacacttcatcagcaacggccggacgaagggatcgacaagccggacgcacccgtctgctgggcctgcatgaagcccatctgaggttgctgctgctgctgctgctgctgggggaagcccgtcatctgcggctgctgcatcatgccggggaagccggtcgtctgcggacgcaacgcatcgtacttgtctaaaaggcaggcgagaaggggacgagagggggtccgtcagcaccagtcgggtccgaggtcaaagaccgacgctgaggcactgacctgatccctgaggagcagcgctctggtcgagcacgcccttattgttcttcatcgccgcaaagacgctcgacgggttgaaggtcgccggctgagccgccgaggactgcggctgcggccgggccgaggcgagctgattgaaggtgtcggccgaggagagtgcgctttggttggccatgacctggccggcctggtagttggtgttcatggccgtgtgctctacgaaaaggacgagataaatcagcggccggaggatgactgcgcagctcgacgaccgcgagacgtacggggtggaaggtagctcggcgttgactgaaagccgccgccagggtagcccgtctgctgttgcggcatgaatccggtctgctgcggctgcatgccctggaagggcgacgagttggcggacgaccgggtcggcacaaactggttgaagccggtctgcgtcgggacgagcgggttgagcaggccctggttggacggcactggcgccggcggggctcgcggtccctgctgctgctgctgctgctgctgttgctgctgttgcggctgctgctgaaacatgccggtctgctgggcctggaggagctgacccatattgctgttagagccgccaaagccaaggccgttgtgatagctctggggcgcctgcatcgacgacgggcccgtgttgttggatccgatgctaaggttgctcatgcccgtattgagaggctgctgcaccggggcaggaggcggccgagcctggcccggctgggcaagtgactcaaacgcactcgaagccgcctgcggcacggcctgggccgagtcaaaggagacgagcgaaggagcgatgggagcggtcgggggcgtcggcgtcgccggcttggtcgagctcggtcgcggcgtccaagcgtcatcgtcaaagccgttcgagatgggcgcagaggcgggcgcaggcggggctgcggccgacgtcgtccgctggggcgggttgaccggcgccggcggcgagactgcgacagcgggcggggtgtcggcccgcgtgagtgagctcgacgcagcagcaaggctcgaagcgtcaaccgagtcggccgtcgtacccttgcgctcgggacgaccccggcgcgtctggttttttagctcgcccgtggaggacgtgaagagaccgctgccggcgccactgctgccaccgggggctggactgctacccccaccgctgcggcggccattctcctcctcctgcagccggcgggcaaacgcctcgtccgactcgatctgcgaccgcgaatcacctccgccggaaggaggcggcggcgccttgcgagcggcgatcgccttcttcacgcgaatgacatcgccctcgcggaggccgaggttgcggagcgtagccgggtcaagatcttcgaggatcgtctcgtcaatcttgtcgcggtcgaagttggcggcatagcgcgtgcagtcgtcgacgtcgacgccggcgttaaggaagaactcgaaccagtcgaacgcaggtcgccgacgctgctgctgggcgggtagccggccagccggcgctgaggccacagctgaccggccttgcgactgcggctgcaaagaaacggtcggccgggccttgttcgagtgcgactgggcgagcggaacgtcatcgtcgtcgttgactggccgccgacgctgctgctgcttggccgtcaggcggtcgatgtactcgctgtcctcgggcgacatttttgcgagcggtacctcgatgacgacgccgttgaccttgtggagtcgaattttgccgcccttgaagccgaggaactcggcctcgaccttgaactgaccagacttgtcgtgccacgtccgtacgcggttcggcgcggggactgacttgggaaacgttgtcgcgagtgagctctcgaacagcagggaacactagcactcgagaggaggtgcaacgcacgtgacctcgacgagctcgactcctggggccggctgggcagacccgacttgtgcgggatagacatcggcacatcgtttgtggaaggccggcttcggatcttcggcggctcgggggcaggggcctgtcgacgggcctcctctcttctgcaagggaaggaggggacaggatcagctcgtgccagactcaagcgccgcttcactggggcacaggttggaaggagacgcactgcctggcctcctcgtcgcgccgcgcactctcctcctccttgcgccgtcgcttctcctctgcctcttgccgggcccggcgctcctccatctggcgcctgcgctcggcctcggcctcggcgcgctcagcgttggccgcagcaatcgcggccgcctcagcctcggcggcagcggcccgctcctcgtcctggcgctgatagtcgttatcctcggccgctccgccggcgccgagctcgacgtaggcctcgggtacgacaccttcctctccttggctgttgcgaaccttccaccagccgtcgcccgacttgtctacgacgacgaggcgctcgccctcggtcagcacgagctcgtccgccccaccctcggcggagaagtcgtaaagcgcgacggccacctcctcgtcatcgtcgctagcaggagcagccgcggcgggtgatgtcggcgaaggcgcccagcggacggccttagtggcagacgaagcgcctcccgtgttgaccgagagacctcccgcctggtcatcctcgctgtcgcctgccgcatcacggcctgcgctagccgtgaaggagccgcccgacgcctctttggaagcgtgcagcttggcatgtacggcctcggcttccgaggctgacgcgcagtgaaaggcccaaggccggccaccgagtgccggcaggtcgagcgtgacgtccttgccggacaggctgaccgcctcgacctcgtcgatcggatgctgctggatcggattctggcgagaaacgagcgagagtgtaccgggtacgacatcagctcgttgcccgcgagcccgagagcaccagccgttcgcgctcgcaaccgagacgcaccttgctggattcgctggcaaagaagatggcaccgttgccgatgccgagcgtgccttttgtcttcttcttcttgccatcgagctcctgatgacgagggttcgacgacggtcggtcagcgtggcgcgcaggtcgctgagaaggggttgatagtgacgaaccgagactacccaggtctcgatgctgtcggccttgcccttgtccctacgctcagcagagagctcggccgggtcgacgtaggtcgcttgcggtggaccctcgatctgaggcaggcgataatgcaaagggcagtggcagatcagttatcatgatagctagccgcagacaccggcagaggccgcttgccatcatgggctacgaccaaatgttttccgtcgcggcagactgcgggcaacgagaggaacaggcacgcacctcgtcgacggcgtctccgttgaagccttcctcgccagcggtgccctcctcctcctggacgtaagtcgccgggacgtagccgccgagctgctcgggctcagcaacccgccgggctaggacccactcgtcgccctcgtccgcctcgaagataaggagcggctcgtcctcttcaatcgagagctcctcggccgtcgtggcagtgtaagcgtagatggcgcgggccctgtacagcggagcggcctgtagaagggtggcggataggatcggtgtgagaagagggtcagtcgagccggcgatagaggtgaccagagctgtgaaaccccgaaggcccgtccgaacgagcagatggcggacccgacgaggcaaggggctccggtcgacaggcaacagcctgcgatgacagcgagccctattaccctagttcctccggcctcgagcatgacagctcgtaaaggaggcgcccgtgatgcagcctccgctcgagctcagagccatatggagaagctaaagggaaaaacgaacctcctcgacatagttggacgggaccaggccgaccgggccgtcttcggcggcgctgccgtcagtcggcttggcccgagccttccaccatctagcacggcagcgcagggagcagatgtcagcctgaggtccagcagagtcgaagccggctgttacagagctctgcaaggaggcggtcggcagccgagatgccgatgtagagcggccgggcaggaagcgagggagagatggcgcggccgggacgtactctgggtcttccttgtcgagaatgtagatcgcctgatcctcggtcaaggggagctcggtctcgggatcctggggcgcatagtcgtagagggccttgtagagcccgagcatcgttttgcgtcttgttctcgcgagagcggcgctggtcggagggcgagggctgatggcgggttgaaggaggacgagagacggcccgcgcgccgccgcgccgacgacgagagcagccggtgtcgtaaagcgcagcgcgcgtcatcctgcccgtctcatcgccctcactaaaccaaggcagcgtcgtagatgtcatgaaagaggtgatacaaggaagcgaagctgggtgtgcaggagaggctccggcgtagggcaggtcggacgactttgggagggtcgactgaacgacgacagggaccagcgcctccaagccctgccgaccgaaccctccctcagtccgagtccgagtcgtcgaccggggtctgcaaaccagccccctcggggacgacaccgcaagcggcaatgccgaccttagccttcggcttgcccgaggccgtcccaaagccctcgatccgacggacgagcgcgagcgagcggtcgtcggcgacctcgccaaagacgacgtgcttgccgtcgaggtgcggcgtcgggaccgtcgtgatgaagaattgggagccattcgtgcccggtccgctgttggccatcgagagcaggcccggccgggtgtgccggagctgaaagttctcgtcgtcaaagcgccggccatagatcgacttaccgccggctggaggggcaaacggaacgggttcaagatcagaacgggtgcgagcgggcaagcgaggcagatgctggactcgcttccgttgtgatttgtaaagtcgccaccctgtcgaagcagcgcattgtcagcacctgcagatgcagcaggcccagctgagcggcgacgtacctggagcatgaagcccggaatgatgcgatggaagcccgagagcgcgtagccaaagccgttctggccggtgcagagctcgcggaagttgcgggcagtctttgggacgacgtcgtcgtacaggcgcatgacgatgtggccggccggctcgccgtcgatctggatctcgaagtagacggcctggcctggtcgaccgaccgagcccgatcccgagctagtgttggacgttcgtgagcagggtcagtccagtgacgctaggtagggcagggtgcaggtgcgacggacgggtgtgccgccgacgacgagccgggctgagccgactcggtctacgtgatgggaagctcggtcagcccgctggcagtttcaggctcggtcaggccacagaccgaccttggacttgcgcttgaagagactgccgaggcccatgattcgctactgagcaagtggctgttaggaggagcttgagaggagcaaggccagccgacgacacgagatgaccggctgcgagggtgccaggccgaggtcgaggctggcgtcgggcacgctggcggagctggccggatgtcgacagatcgtctccctcctgacgatcaacgacgagctcggatgctggctgacccggagggccattctcatttagtactgccactctcgcgccattggcgtcctgctcacgctcgcgacgttgcttccagggacgtgccggccggaccaactcgacgaatggccacctcgacgcgttgcggcaacagcagccgattcctactcaatgagccggcccgagcatctgagcggcggtgtgccacgcggggcgcggtccaggcgctgctcctgattgctgacggaccagttgcctgcgtgctctggtctcagcgctcgtcgccagccgtgactcgcgtcattcgtcggtgtcctttaactcggctgtcgtcgccaggtcctgctatgagacgctcacggatggccacttctgcggacggcatgcgccttgacaagccacgaagatcgtccgaaggtacgagcacggctcgtctagccgacacggttccggccgcgcagaccggtgtgattcgtctaggtgagcctgcgctgctcgcgagggctctgcaagcgacacccgctgaatctaacgtctgactaacgcacctccaattcaaccgacagtcggccacctctcgacgctcgagacgcgctcgctcggttgacatgcctggctgctgccctcgctcgcgagagacggagcttgcaggtcacgcgcacgtaccttggctgtctgagccggtcgaggccgagtacgactcccggtatggcgaccggcccgcggcagaccagtccatccgagtctcgccctcttcctcggcaccggccaggcgacgccaggtgcgtttctggtcaccagcgatcgatcgcgctcggaacgctgaccctctctcgcacgttacgccagatctgccgtccatcatgatggagcggctctatacatcgccgacgtacggcatgtggtacgagatcgacgacaagatgctctcgtctaacctgccgccgatggtcgtcttcccgaacgagagcgaattctatcaaaagtggaaggaggacatggagcgtcgcggagtcaccgtacgtctcctcgccaatgccgcaacaagtgcctgtcagtctgctgacttgttttctgctgcctcaggtccggctgtcgaccgaggtgacgcgcatcatcaagcgcgactcgaccggcgtcaaagtcgcgatccgccagcgtcgcgctcagaaggaccaccataaccccggcggcgagacggacccgccggtcgacaccgacatgcccgagacggtcgagaacgaggccaaccggctctcaaacgagcatcctgcggtctcggaggagttccttgcgcgtctcttctggccaccatcgagcagcatcagggttctccttccgcccacggcacgctcattcgccgctggcgctgtgcgagggcttcgtctgactccaatcctttcctcaatgcttgcaacgcgtacaatatggcccaggccacctcgagaacaagagaacaaacgacctaggtatgcaacatactctaaccaatgttggtgctgcggcaatattcggcacatcttgaccttctctcacgcctgccgcctccattgtcccaccgccgtccgtctctacatatgccttcgacttcgcatcgcacgtttccgaggagacgaccgaagcagctcccctcctcgcgtaattcgttgacactgcatttgtggcgtagacctgaatcgcttgacagccggtcgcctcgcgtcgtctcgacctgaaccgtgcctccgaaccgaccgttgaacattgtggccttgccgttcgcctctcgcgagctatcgaaggcgattgaacaccattacctgatggggcgacagaacacgccacgtatctcctgccactccctcaagacattctgcttgtaagactggttgacaaaacggggacagggattagacgacgtcatcattgttaggggtcggtttctgacttgtgcctcggaccgtaactcgcaggcggtcggtgtacctgagcgtaacccccggccggaccaaaccgacggccggcggccaatggaacttggtcgtctggcctggcctggcctcccctccttcctgtccaccacccatcatccatcatcaaccatgcgtaagtacaccctcagtctcctcctgtcgagtctcaccatggaggggaggaaggggggcgatcagcacctggttgcgccccatcgcacggtgaggtagctgaggcactgacagagttgagctcggccgcactgccggcgacgggcgtgtcctcgatcatgccgacagtctcgctcatgccaacaagctggcggcactcctcgtggctgaggacgtccgtcagaagcgtcgcaccgggcacgccgggcacgtcccagcgacggacctcccgctcagggcttgccgccagcgcgagcaggcttgcggtcgcaggcggtaagtgctgaacgatggccgggtagaggttgggcggcctgcgcgaggggccgggcgtgatgtcgagtgctgcgacgccggcaacgaacgccgccttctcttcggccgagaggagcgtgtcggcctcaaccttggcccagaagcctgctggcgagtgagtgtcgtctccaatgagaggacggacgtcccatgaggcccagtgccggacgcccttgcgaccgaccgggacatcggcgacgacctctccctcgccggcgcccttgatcgccgtcgagacgcccgtgcaggcccgaaggatagcgtcgagcacagcccagagcatctcctcctcgccatcaccgacagcctttcccttgcgccgctcggaggactgcacggcagcggcgtcgcactcgcggacccagcgctggagcgagccgagcttgggcacctggccgcgcagccggagctccgaaaggaggacgagcgactcgagatgctggccgttctggagcgtcgtcgagatgcggctcgtgaggcccgagcctaccgcgggagggaagggtagtgtcagccagacgtgctaacggccgttgtcaacggactcggaaggccgaccggttccagagacctcgccgagagcccgccagcagtcccacatcgctcccttgaaggatttgatgagccctcctccgcccttgccggccttcatcagctcgggctgagccgcgagtgcacggaggacctcgatggcagcctcgagctcttccggatagaacgaaccgccaatcaggccgtcgtcggcgtcctggtcggcggcagaggcggtgggctgagtgacggcggcagcagcgccccctgcggtggacgccttcttggccggtgcggtcgacttggctgtcggctgaggggcagacttgcgcttcttgttgttgctcgacgacttggccatcgtggatatgaaactgcaggtcgaatggggcgtgatcgggaggacggttgcagggtcgggtggtagcggctcgaacttctcggagcagcgcgcagcagtagcagggacggttgtgagccgcctgtgaccttggccggccgggccgtcagctgtgtcttcgcgattggcacgagcggacgtctatcttcagagggtaacagagacgaggaggcctcgcgcttacaaatgatcacggggagcagcatccattggtttccgagggagccaggccgccgctctcctcgtacaagagccagcagctctacgtttgaggggctacagttttttttttttttcgtttgcagaacagaaagtgtgcacgcgcttgtcttactttcgcgagttgcagatgtcggcaaactcgggcttgagcgaggcgccgccgacgaggaagccgtcaatgtcgccctggccggcgagctcgaccgagttcgaggccgagacggagccgccgctgcgagcggataacaagccggtcagagcggaacagcgagagaggtcgttgctggagaagagaacgcactagatgatgcggacctcgtcggcgaccttctgcgacaccttagaggcaacaaacttgcggagctcggcgtggacgtcctgagcctgctgcgaggtggcgaccttgccggtgccaatggcccagactatgagcgaataggaaagaatcagctcgagcgacagctgcacgagtaagcgcggggcaccgtaccgggctcgtaggcaatgacgacgttcttccagtcctcctccttgatggcctcgacgacggcgccggtcattccctcgcagacagccatcgtcttatcggcgtcacgctcctcgagcgtctcgccgatgcagaggacgaccttgaggccctgggcaagcgcggccttggtcttcttggcgacgaggtcggacgtgtccttgaagagcgtccggcgctcagagtggccgataagcgtccagttgatgccggcgtcgacgagcatgtggggcgagatctcgccggtgaaagcgcccttctcctcagagtagacgttctgggcggcgagctcaatcttaggcgaggatgacttggcgttggccttgatgtactcctgcgacgggatcaggtagagcgccgggacggcgatgacaacctctacagcaggcgttcaaaagcgatggtcaatacatgatgtccagagagcgggacccaaggagtgcagacggcggctcgcggccctgacgtgaccaggctgcgtgcggcaccgagggaagacgttgggtgccaagctcgagacgaccccgggcccataacagacgctcgggtgcagcagtatgtaggctctgttgcacccagcccagtacaagcagacggagcctaccccctcaaggaaagacgaagactgaccggtcttcgagtcgatctcggcggcgaggagaccgtcgaggagctgtgtgcaggccttccacgactgcagatggggtgacaagaaagcttcagcggcgctttcgagtctcgtgcgcaggcattggagcgacctacggtagggttcatctgtgatcagaggcgagtgagggcgggttagtgctctagctcccgacagacgaacaggaaggggccgtctcgcttcgaaaagaaggcgcctcggagcgtccgtcgacagcgagaccggcctcgctcggacagacggaccttgaagtttcctccgacgaagaactggcgagcggcagacatgatgggcaaagaacaaagtagagaagggagggaggaggagaggggagatggggggatgatggttgacagggaaaagtggcggcagttggcttcgccctcgccgctcgttcggcccagctcgggcgatctgccaacagccacagcaagcagcagcagcagacagaacacgatggtcgccgtcaagtcgtgggacaagttccagcaggagacgatcaaggtcggttcatcgtcagcagggtcgctcttctaggttgtcgttggcggactgacctcgccctcattgctccctccgacgccttcgacctcgtgcctcgcctctgacctcagctctacgagtccaactcgacaaaggtgcgcgcccaatggacctcccgtcgtgcagatctcacacactgacacatcttaacacatcctgacggggcagacgcgctactcggtcaagtttcgggcgatcgatggcaaactgacgctcaagatcaccgacgacgtgcacgtccgtagctcgtcgtccgcttgccgtgattcctgagtcgtcgcttatgctgatgagctctccttctgacctgtcaccttgctctcgcttgctctcgcaacccgtccctgttctcgtcgctggacggacgtccatggggttgtgtcgtcgccgccaggtgttcaagcacacgacgtcgtcgagcatcaccctgaaccgcttcaccgcgctcaacacgcttttgttcgagaagatggccggcacctcgctcgcgcctccgccaccgccaccggtaccatcatcaaaagcagcagcagcaggagaggggccgagcggctcgggctcggcaggcgcgacgacgccagcggccgatgcgatggacggcgtcgagccggcaccgacagcgaaagcgacttctgctggaggcgcacccggagcaggcgccaagaagaagaagaagggcaagggcaagaagtagagggctctgatggtcatgcgtttcgtcggcgcaccggtcgagctggcagagtgttagctggagactgaatgctttcagtcagcggcatggagggccgtctttctgttctaggctgcttgcgggtctgcaaaccagctacaagtcctctgtgagcctttcaatcactttgtagcgcacagaccatgtgcagcatggagaactcgtgcgtcgacagtcgacaggggttcgcctgggcactggccagcgcgcggagtcgttctgcgcagcctttcagcctgcacgcccgacctctcgacgaccaccttcttcgaccctcgcacctctttctcctcgcagtagaccgccgtctggtcgtcaagagacgtgcctgtgagttcaaccaagctatgttcaagatcacgacgccccagctggcggtgtacgacgccccgccgtcgccgccgtcggccctggcctccctcgggatggacgtcgacggcctctcggatctcgagcacgacgccgaggaggacggcatcgacctcgaggacggcgcagaggtcgtcgtcgcgactccagggacggtcatcacgagctcggcgctcttcatgcggtccgtccctcctccttgccgacttgagctggcagccctcctaattgagccaggggacgccgacaactgacgttgctcctctccctctctcgcagcggccacgggacctacatttcggatgacaaggtcatctcgtctgtcaccggaaaggtcgagcgcgtcaacaagctcgtctcggtccgaccgctccgcgcgaggtacacgcctgaggtcggcgacctcgtcgtcggccgcattgccgaggtgcggccctccttgccgcccgctgtcctaggtcgctgcagtaggacgacactgaagccctgtctgctactctccaggtcgtcgccaagcgctggaaggtggaggccggcggtcggcaggacgcgatccttatgctgagctcggtcaacctgcccggtggcgtccagcgccggaagctcgagtcagacgagctccagatgcggctgtaagctttccgagtctgaggcaggtgtccgtgctctttgctgactccttgtggccgtgccctgcttccgaacagattcttcgaggagggcgacgtgcgtctgccgcagacaactccgacgtgagctgaggagttcgtgactgactcgcccccgtttgctcccctcctctcgcagctgctcgtggcggaggtccagacgcttatgggtgacggcacaatgtcgctccacacccggtcactacggtacggcaaggtatgttcgcctattctcatgttgctgccgccgccgacaatttgtctcacacctacaccttgtctgcaacccctttgcagttgaagaacggcacactccttaacgtttctccggcgctcgtcccgcggctcaagtcgcacttctactcgctgccttgcggcgtcgacctgatcctcggcctcaacggcttcatctgggtctcgatgcacgtctcgcgcggcggcgacgacggagagggcggcgagggggccgcagacggcttcgactcggaggctgtctacagcagcaagaacgacgtgagttcttgtggtccccatgtcccgctgtctgcccatgggaaactgacctgctctcgcttgcccacccagccgatcccgccacaaacgctccgggcaattgcgctcgtctcaaacatcattctcctcctcgcccggaacaacatggacatccacccggcctcgatagcggaggcctacgacctcttgcttgagggcgagggcggcgaggttgtccagggagccatcagcgacgaggtcgcggagggcatcgtcatggccctccgggcgggcgcgctcagttgaatgaccttcgcgcctgagaattgcgaagaaatggcggtcattgagagtgtggagtgcggagacggtttgaccaagcgagaccgtagtctatggggagaaaagtgtggtgaaagcagacaggtcacgagggggcgaaagggttcagtcgtgatgcggacaggcggaagcagagtggggggggaatggatcaaggagcccgaaggaagcaagaaagatgaggaggtcgttattcgtagatagggaggaacggagagggcgtctcgtatgtgctgagggtgaaaagggaaggaaataaggccaggcacgcctgtcgtctacttggactggccgtggtcctcgccatcctcgccccaagagtcccactcctcgccgtcgtgcttgagcacgctcgatgccgtgtcgctgtgctggtagatcggaggaggcgtcgcccggccgcgcttctccttaagggcagaggaagggccgttgccgagctccgaaatggtcggcgtcggaaggaccggaggcgtcgcggccgaggctgatctcagtcggccagaggagtacgcccggtccctgtttgttggccggatgggcgtgaaggtcgctgcctgggcgtctggcggcggggtcgacgtcaggaatgccggcaggaagaagaggacgccggtccgagacgaccgggagcgagcgcgtcgacgcccgccagacgggttgatagtcggcaacgacgggccggtgcctcggccgtcggccccgggcgtcgtcgaaggcgagtcgccgacgaggccacggtacgtccccgagggcgagtgcaggccctcggacagacgccggatccagctgaacgagctaccagtagactcgccgtcgccgtcgttgctgtggtcgccaccctcgctcgtcgcggccgtgctgatctcgctaccgtcgtcctcgccgtcctcgggcaggagcgagagcatgccgtactggccagcgacttcgcggacgtcgccactgaggctgatgacgagaccacggaggccggtccggctcttgagcgcaacgccgccacgccgagtccacatcagccggatgaagccgacaaggacgagcagaaggccgaagcgcatcagaccccgaccatgccggccgaggaagatgatgaagtccgagtcgtccgagtgccagctcgagccgtaaaagtgggagaagaaggcatggggcgcctcttccggcagcgcattcttgccgtagagcgacttgggcaggacgcggatctcgagcgtcggcgagacgggcgtcaccgggtgcgacgacgtgtaaagcgagtactgggccgacaggaacatgggcctgcgggggaggaggaagaggcgtcagcaagggccgacgtcgtgtggccatgggctgaggacgaacccagtcgagaacatgacggtcgggtagttggtcacgtagttgtggttgaaggtaatgagcctgaaattgggggcggcggtcagcaggtgatccgatgctagcgtgcgctctttgacgcacccatggatgaccatccacatgaaagggttgttcttgctgctgagcatcaagtcgttgctgacgccgacctgtttggcagagaagaatcggtgcgtcagcagcggctagcttgcaaagctggcccagtcttaggcactcaccgggatggtcttcgcaaggatgacgtcccagtctccgcgcaggagcggcgtcgggtcgcggatgatgccgatctgcgagtgagtcgagcgtcagcggcgcgctctcagacgacagaccttcaccagcgactcacgtcaaggtccatgtagatgccgccataccggtgaaggacaaagtagcggatggcgtcggcccgctggatgttgtactcatacgagtcgtacgtcgcgaggaaagaggggtagtgcgtctggatgaagacacgagcagtcgagtcggtccagaggtgatgcgtgctgcagacgggggaggaaaagggagagcagatcagtcgccatgctcgcagacgtggtcgattcagagacgggaccaacaagtctggcagggcccggacgtgctcctgataggttccctgggagcgtccgggagcagcgaaggggcggcaaaagcgtcagcgctcgcggccggccaagctcgaagcgacggaagggcgactcacgcgccacttttcaggcagcttgtcgttcatccacgtctggtggatgatgcgcgggatgcgctcaccctcgctgcgaaggtcaaacggaagcaaggctagccggcgtcagccctgcccgtctctaggatgatccccaacaggtcattggctctgcccgtctgcgaaaaacgagcacgcacagaggctcgatgccctcgagatggtcccaggtctcggtccgctggacgacgccatcccacttggaatcgtatgcccaggaaggcgccttgacgccggtcgagctcgcgttgcccgacacccgggcggcccagttttcgtgcggcaggtaagggacatcgcgctcgctcaagagcgcccaattacggacgccaaagaaccaggtgaccgacgagaggacgatgacggtgccgagactgagcgagaagaggcaaaggagggcgtgtcagcgcgtcgacgagagggcgggctcggagcggccgcgccggcagcccagcacggccgagggctcaaagcgctctgggcagggcaaaagacgctacggagcaaaggaacgtacaggaagagcgagagcaggatgatcaagatgaacaacggcctgcgataccgcgagtgggtggccttgcgaggcatgctgggcgactttttcaggaggaaggagggttggccgaaagcgctggggtcgacacgcccggtggactgcgggcggaggcgaggcgatggcccggacgaggtcggatctcaagcggcaggagccagcgtgagcgcgctttcgcacagaaggcgagggagagattaggcggtgctcgttggagtgtcgaagagaggcaaaggaagggaagaggagggcttgatgaaaggtgttgtcggtcaggacgaagaggcgtcggaggcgaaggctccggccggcctgccgggcgccgcgagcccgcccggccgacggcggcggcgaggcggcgagttgtcaagcgagggtcctccactgtcgagtgactctgtctcgctcggcgcgcttcgctgggcgggcgaaaaactatgagaagtcaggatctctcgcagctgcagcgtgcctgcttcagggactgagaaggcatgaaacaaaagggagaacgagaaggctatttgatttaatatatgtgtttacttgcggtcgccaacattgaaggagagatggccgagtggtctaaggcgctagcttaaggttgattattcaattcgctagtcttcgggcgcgggttcgaatcccgttctcttcataatcttttgccgatctcgcagtcagctttcattttgggtcgcagctcataatgaggtgctgtaacagaccctcaagcctgtgcgctcagagaagaaacgacattcctgatgttggagtaggcatgagctaatcggacacaggcggcgggcttcacggcgcagctcctctcgcccgaccaccatcacccgcagcatcgacggacgaggagtgagcgtctgacgccctcgcccctgcctacgtgcaagctgaacctcctccttgacacctgcagctaccaccggactgatggctgagcgatccgcctctcgtctctgcggccgacagcttctcgtcgtcgccggcttacgttcgtccgccggccttgttcgacctggtccgtagctcaacgaagccgtctactgctcttagcggctaccaggggtgcgtcttgtcctgaataatctccaggccggcttgcatgagattgcatctgcgccgagctaatctctcttcttcgtcagccttacagctctctttctgatcagctcctgcccctccggtcgactcctgcctggcttccagacgcaacctgcgagtcaagctcgaaggccagcttgtgagtggtcgacgtctggacctctcgcgtgagccgcagttgactcacaggctgatccgctcggacggcactcttgccttgcaggacgccttgacgaccgtcgtcggcaaaagatttgaagtgaggagctcgagatctcgcaggtcgtgggtcccaatttggtacctactcatgctcggctctctaattgactctgtccctgttcgcagacgcaagccggccatccgtccactcttcctgcttgcctggcgttccatcgagctcaaggttcgtctcggcgtcttgtgttggcgtcccggcgagttcccctgctgacaccttctggtttgtctctgccgcgacagaaatacgcctcgttcatccagctcagtcgttgcgcgcgctgcgttcagaccttgcggtaggtcggaggtgcgccggggaggactcttctcgaccctgtgacgtctcgctgatgtgcagcctcccccgctagaccgccagccgcgcttcgcagcagaggatgactgtcaatccccaaggacggcagccggttcagacatcttcaagggtctcgcacccgagcctcggctcaggtggcggtcggagcggaccggccatcgccccaccgaccgcggccgtcccatcgccgctgatggcctcgggcgaagttccgaccaagttcgagcccacgctggccaagattgacgacaatctcaaggctaagtgcaaggcgatcgaaagcggcgttgccgccgcttccgccgcctcgtcctcggccgacatgggcagcgcgacgctcaccaaggtcgcgcaattgatcacaagcaggacccggatgcgaccagcttccattccgtcatccagatcatcgattacatccggaaggcccgctgtcgcgtcacaaaccgcgactcgtgcgtgaccccttcccaccgtgctctgcgcttctgaaggggctattctcatcctcgctcttcgcctttccctcgcgtcatagagcgaccgagactcgcgttgcgtcggcggctctgcttacgtggccgcccgtgctgaatccctttcttctttctcgaagcgccgcttcgaggagcacgaacaactgtcgttgatagctactggtcgaatcggatgaaaatggcatgtgcctggccgcatgaacgcttcttcagtggctactctcattgccattgcgcgccctcgccgctaaaatagcttgtccactttcacacgacaagcgaggtccctaccgtccaggggtagtggcgtcctccactcctggactgcgagttcgagcgattggagggcagcgaagcgagcgacggcggttgcgaggctcggcccgtcgaggacttccatgacagacaaattgagctcctcgagggtgtcgggtgcagcggcgagagcgcgcagcgtgtcgtcgtcgacatagttggcggtcaattcaagcctgcgaaggttgctcaggttgaaccatgggaaggccgtcgacgacggcggaacgttgtcgagctgaaggaggccgagtgttttgaggtagggctggacgagattgaccggcgccggtccaatgcaacgcactgcccaaggtagaccgtcgatgatctcgaggttcggaaggctgccggtggcgaggtaactcagcagccttttgcagtgcgcgtgacctcctgcgagctggatgctgcggacgagagctgcaagccgaggcttcgcctgtgcagtggcgaagaagagggccgagcaggcctcatccttgtcctcgtagtcctgagcatcatcacctacgaggaaggtgatgtctttgaagagcagctcctgcgcctctgtctgcgagagacagtcgagatgagcggccatcagccgacagcgtcacgcacgatcagtcagccgttgaggcaacataccgcccagtcgcgcgagacgagcgaggaggccgtgagctgtcgccgtcgggcgagcgtctcgttgtggaaggagtggtcgtcgcgctcgggaccgttctcaagtgcgaggcgaaggatcgcgagctgcaagtgctttggcaacgagggcgacctaacagacaggacgaccaggttgaatatgttagctttggtaagaggaaaaggtagcaagaatcttctcacatcggtgaattcggaaaaggcctgcgaacaaccggcagcagcgagaggcaagcgggctgagctggtcagtaaaggcgcacaggccgagatgaaaccacagtgaaagctggcggctccgcaagctcatgcgccggcagcctcgatctcgcagctggagtcaagctctagaattgacgtacggcgtctgcccctgtagaatcctgcaggaggataggcgtaaactcggaaggagaggtgggcgagctgacggtaaggtcgacgactggaggcgagctcgtcagcgattcgacttgtcggcttccgtcgcgcagtcggtttcagtccaagctgcaggttgacctccttgtctgctgaccgccatgccgtcttcatcaagccgcaagaaggtgcgtcggttgaagccatcgatctgagcagtcggctcatgtcgctcctccctccatcgcttgcagacgggttagggtttaacggggcatgcgatgggagcagagggtcagaggcgctatagacggtggtacattggaggcgagaaggagttcaagtggctaaggggcttcgcctaaaaggcgaagaagcgagcacgggcacggagcagagagagcgagaggaggcgagagaagagaccatagcggggcataaggccccgccagtgagcgaagagagcaacagtcgaaggagaaagagttccaccggtcgagatgacgatcgggtggaagggagacgacgtccggccgtcgtacttcgagcgcttctggttctcagttgaagtgagttggttgaggagagaaccagtggcgcaagcagtacgcggcgcagcgtcggcagagacaccagcaggcagcagtgacgacggaaggccggcgacgtcggcagtggcgatcggatcacggccagcgagggtcgccgcagacacgacggcaacgtcgtactcggagacaggaccgccgaacgagccagggccggtcacgcgcaagtccgtgcgctggcgagagcccgggacgaaaggctcgagcgcgacgcgagtgcgggggatggagccgagatggcgtgagagcaggcctttgacgtgctcgtgccgagcgacacgccagaggggacgggccgagcaaacgtcgtcatggccgacgacgttgggcagcgagcaatgtgagcagtggtcgtcctggccggggcagagcgtgcggatcgacaggccagcggcgacctcggccgacgtcagacgcaggttggcagcgaacgggatggccgacatccagcgccgggcgatgggcgaggctttcaggctgacgaggcgtaccaggtcggcaagggcctctcgcctgtcgccgcctacctcgcccaggacgacatcatccgcatcgcgctcgagcacaatgtcgacatgatccacccggggttcgtccgccgaaagctgccggccgtctctccatcatacctcgtctgaccagccacacctctgtcctcctacagctacggcttcctctcggagaactcggagttcgcgcagaagtgcaaggacgccggcatcatctttatcggccccgagcccgccgtcattgccggtctcggcgacaagacgacggcccgcgcgctcggtgcgtctgccgctctcctctttcgcctcattccttctcgcgccaggctgacctcgacgatctatggccatcttcagccatcaagaatgacgtttcggtcgttcccggcacgcccggcgcggtcggcgcctgggaggacgccgaggccttcacaaaggagcacggcttcccggtcatcatcaaggccgcgtttggcggtggaggccgcggcatgcgcgtcgtccgtgagcaggctgagatgcaggacgcctttgagcgcgcgacgagcgaggccaagagcgccttcggcgacggcaccgtcttcattgagcgtgcgttgtcctcggcactctgtgactgccttgcgctgccaggctgactctccttgccgaatcgccactttgcctgcaggcttcctcgaccagcccaagcacatcgaggtccagattatcggcgacaacgagggcaacatcgttcacctgtttgagcgcgactgctcggtccagcggcggcaccagaaggtcgtcgagattgcgccggcgccgcatatcagcgacgagacgctcaacggcctcttccgcgacgcgacgacgatcagcaagaagattggctactcgaacgcaggcacagtcgagttccttgtcgacaagctcggccgctggtactttatcgaggtcaacccgcgcattcaggtcgagcacacgattaccgaggagatcactggcatcgacattgtcgccgcccagatccagattgccgccggcgcctcgctgccctcgctcggcctgacgcaggacgccatctcgaagcgcggctttgcgatccagtgccgcgtcacgaccgaggacgccgccaacggcttccagcccgacaccggcaagatcgaggtctaccgctcgtctggcggcaacggcgtccggctcgacacaagctcgggctttgccggcgcccagattacggtcagtcgattccctagcgcaaagaagtgtccctgttgctcagctgaccacccacctggccctctagccccactacgactcgcttctcgtcaaagtttcgtgcagcggcgcaacgtacgaggtcgctcggcgcaagatgctccgcgcactcgtcgagttccgcatccgtggtgtcaaggtgcgtctcctcccaaggaaacgaggttcgatcgcgcgctgacatcgtttttttctgtccgaaaagaccaacatccccttcctcttccgcctgctcacgcacgataccttcgtttcgggcgacacctggacgaccttcatcgacgacacgcctgacctcttcaagctcgtgacgtcgcagaaccgcgcccagaagctgctcgcttacctcggcgacgtcgccgtcaacggcagctccatcctcggccagagcggcccgcccggcctcaaggaggaggccctactgcccaaaattgtctcgcccgacgacgaggagaaggagatcaacaccagcgagccctgcctcaccggctggcgcaacattatcgtcaacgagggccccgaggccttcgccaaggccgtccgggcttaccccggctgcctgatcatggacacgacctggcgtgacgcccaccagtcgctgcttgcgacccggctccggacgatcgacatggccaacattgccaaggagacgagccacgcgctccagaacgcctatgcgctcgagtgttggggaggcgcgacctttgacgtcgccatgcgcttcctctacgaggacccctgggaccggctcgtacgtcgctctctgtcctttggtcatctcgtcgctcgcttgctgacgccctgcccggtgcccaacagcgcacgctccgcaagctcgtgcccaacatccccttccaggcgctcgtccgtggcgccaacgccgtcggctacacgtcgtacccggacaacgcgatctacgagttctcgaagcaggccgtcgaggccggccttgacatcttccgcgttttcgactcgctcaactttgtcgacaacatgaagctcggcatcgacgcggccaagaaggctggcggtgtcgtcgaggccgccatctgctactctggcgacctggccgaccccaaaaagactaagtacacgctcgaatactacctcgacctcgtcaaccagctcgttaaggagggcatccacatcctcgccatcaaagatatggctggcctgctcaagccccaggcggcgacgaccctcatcggcgccatccgcaaggcccacccggacctgccgatccacgtccactcacacgacacggccggcattgccgccgcgagcatgattgcctgcgccgctgccggcgccgatgtcgtcgacgtcgcgatcgacgtcctctcaggcctgacgtcgcagccggccatgggcgccgtcgtcgctgcgctcgagcagaccaacctcggtaccggcatctcgcacaagaacatccagggcctcaaccagtactggacgcagatccgccagctctaccagtgcttcgaggccaacgttcgcgcgtccgactctggagtctttgaccatgagatgcccggcggccagtacacgaaccttcagttccaggcctcgcagctcggcctcggcacccagtggaccgagatcaagaagaagtacatcgaggccaaccagctctgcggcgacatcatcaaggtgacgccgtcgtccaaagtcgtcggcgactttgcccagttcatggtctcgaaccagctctcgaagcaggacgtcctcgaccgggccgagaagctcgacttccccgagtcggtcgtcgagttcttccagggctacctcggccagccatacggcggcttccccgagccgctccggacggccatcatccgcgaccgccagcggatcgacaagcggcccggcctgacgatggcgccgatgaacttcaagaagatcaaggccgagctgcgcgagaagtacggcaagtcagtcaccgacactgacgtcgcctcgtacgccatgtagtacgtcgcccccgtctcccctcttctgcaagaggttccagagtgctgaccggtttccttgtccgccttagccccaaggtctttgaggacttcatgggcttcgtcgagaagtacggcgacctctcggtcgtcccgacccgcttcttcctcgccaagcctgagattggcgaggagatgcagatctcgatcgagcagggcaagatgcttatcgtcaaactgctcgccgtcggcccgatcgacctcgccaagggcacgcgcgagtgctgtgcgtcgtcgctctgtatcgcgcctgttacctttcctggtccgtgacgctgacgccagctccaacgtctctcttgcagtctttgagcttaacggcgaggtccgcgccgtcctcatcgaggaccgggacgctgcgatcgagaaggtctcgcgcgagcgggcctcgagcgagcccggatccgtcggcgcgcccatggccggcgtcgtcatcgaggtccgcgtcaaggagggccaggagatcaaggccggcgacccgctcctcgtccttagcgccatgaagatggagagcgtcgtctcgtcgcccgtctctggccacgtcgcccgtgtcgttgtcaacccctccgactcgatcggccagggcgaccgtgcgtactctgttctcgttcatctctaccgcacgcagccaaacgctgacacgttgcaccttgcatcctcagtcgtcgttgagatcaagcactaagcgcctgtggtagagttcctcactgtccttctcgcatcaacactaaagagacgccaggaccttcgccaggcctggcttactctccgcatctgctgcgcccccgcccgctcgcacccctgtcttgtagcccgttcaaccctctccttctcggcatagagcccctccccttttttggtcgcttgtattaccggtaccggctctccggtcgccccgcctctgtcatgcccctcagcctcggccagaaatctctgcgaacctgcatctcatcaacccttgccctgcacgtcgacctcgagcagctcgccgccgtccgtccgaacctcgaccgggccgtcctgcggcgagacaaccgtgattgtcagcttgtttcgagccagaggacaccctcttacgaagacacttaccgcgtcgttcatcatctgaatctcacgctcggcccgcgactcgcccgagtcgtcgtcttcattgcactcctcttcacggatccggaggaacgccagccgattggcgcctggtaaggatgaagaagcagccactcgaacagtcagcgcaacggccggcaaactctgcagccaacgccaccgcataccctcgagccgcttgagcttcgcgctgacagtcaaaaacttggcaaacgtctcgcggtagcgccggatggaatgcaagaggtcctcttcgctctggccgacaacgctggaagggcgggcagagtctgcgtcagttgctggccagctaaagcggctcggcgtgtcgagacgcgaacgtacgcgtcctccctctcccagagctctgcaaggtcatcgccatgaacgccagtagccttgatatccctgacacgagagtgaaatcggcagaagcgtcagccctcctctcgttcgccagcgagaatggctgagacgcaccttctctggacgtttcggtcactctgcaagaggatctgggcctttgagcccttctcgaacgtcccaatcattacgctccgcgacagcgactccaaccggcacgccctacgcagagatagtcggtcgaggctttcattggtcaacgtcccttcactgagtcgattcgtagagtcggcgggcgacgagggtacttacagttcaatgatctcgtcggccagtgccgtctggtcctctcggcgccgttcagccgagcggtgcgtctggctgtcggcctcttgcgcgagctgattccaattgtcgaggacgaagctggcatgcgaatggaactcgtcttcgccggcatcggaccggttgagccggtcgcggccgccctcgatgtgctcctgccgcttctcgcgggcggccgtcagctgtgcttcggaagcgcgctcgacgatggtcgtgattgttgagacggcggccgaggcgacgacgggaactgcaacggccatcgggtcaatggggggaagcagacaagggagagtcgatgaaggagacggaccagcgacaagggcgtaactgcggcatgcagaggcaagtcagagcagcttcaaaggcatgtcttgaaacccacccgaagaacggtggcgactcacaagatgaagaagacttggccgaaaggcgaggaaggcgcaaagtctccgtagccgacctgtagtgcggatcgggcgacggggtgtcaattactgatgctgggaacaagccgagctcgcgtcagcgagtggacgactcgtcactcacagtgaggctcataacgccgacaaagtataagctgttcccaaactgcgcggaagagtcagattggctcaaggcaacgagcaaaggaggcattacgcaccgaccaatcgagctctgaccgctgaaagactgcagcaccgacgagccaaaagacgaggaagccagagagagagaccacctgcgttgagtggaggtcagatcaggtcagcaggtgacagcggggaaccgaggcaggtcgagacgcaccaggtcaaaaagctgggaggccttgtgctcgcgatcttgcatccgagtcaggaattccatctcctcggacaggccccatttggtcgtttcttcgtccgagcgactttggcgggcaagcagcaaccgctgggctcgaaacttgttgcgccgcagctgtgattggcggccaaagtctggtgagggcgaggcgctgagtgtcagtctcgtcggcgagtgaccgtctagggatcagagactcacagctaattatcatggagatctggttggcgaggagtgcgatcgagaggatgaggaacggaaagagaaggatgcgggttgaagttttggtaggcacgtcttgacctggcgctcgcaagcttcgagtcagcaagcgcaggaaaggcggctacaccaaaggttgaacgcaccaaagccgacggtcaatgtcgacacgatgcagaagaagatgcccgtgacataggtccagccctcgatctttgagaagacgagcgccatcagagcgatgacgaggacgaaggccgtgaccgagagcatgaagtgccggccgtcgatccggaccttgatcgagtctctccagtccttgttgcgctgaacgacccagtggagagagagcaagagagcgacaaggcccgacaggccgcagctgaagactgcgaaggtcgggctggcaagcgtgagtgctctgtttgacggaaaaagatctatgaggcgcagccaagggagagaatctggacggacctgcgcaccatgcgccctgcgagtaatagaaagttgagccgacaccggcgcggtggccgtagatgccaaggttgacgacctcgacgatcgtcttgatccagaaggcgacgagcggggcctcgacgacgagcgccttgaccgagggcacgttggatgagaagcggatgacgagcagggcattgccgagaacgcaggcgaccagactgacggccgacatggcaatggaggcggcagggtccgcaactggcttgtcgtcgacgactggaggcaagggggagagaagggggcgcagttcagcgtgctagagctcaacgaggcgtccgcgcaggtgaccgatcgacgagcagggcgacgcacggtaccatcgctgcgtcagggccgggatgtcgagcagcgtgatctgtcggccgcacaatccttagtcagctcgacgaacatactattggccttccgagggcagcggcagcaggcgacgtacgagcggggcgacgatagctgctccgagagggaccgttcgagcgagtcggacgagccgagacgccggctgatcctcagctgcagaggacggcatctggaaggcgaagaacagaaggttagaagagagtggatggtcgtcagcggtgagcgggtgatgggctgctgggagccgagcttacttgcggccgtcggtcggtgcgagccgcaacgcgtcagaggtcgccgccgcccaacagcgaggccagtcccttcatttgacccccgcctcaaggacactgggacatcagcatgtcctggagattatgcgaatggactcattctcgagtcgacagcctcggggagcaaacaacctactcaaggcgtccgctgcagcgtcgccgttgacaggcgcgcagccggccctttcacatggtcgacgacatctgagctcacgtctctgctttagcagctcaactgtaccggatcgaaggcactgtacagcccacagcacgatatcctgcctctcttcggtagcctcatggtgctggcgcgacggcaggaggggcaggcggcggggctggggtctaggcagggcgatcagcttcgacttgcatctgcacagccattttcccgcgcgctcgtccgcctcgctcgccgccttcgcccctcgagcaagctcagcccagcccggccgcgactctcctgccaccctcacttcgccagcttagctcgccgaccgccatggccctcgccgccattgcccgcgccaaccggccccagacgccgcatgcgtacaagcttctgctgccgcgcaacccgcgcgtctcggccgtcctcctgcaccggtcgccgatcatccgctacaaggccggcgagagtctcaagctgacgtccgtcccccggctagccaagctcttcccgcacgcggccgacggcaaggagcggacaattctgctcaagcgcaagatccagcgcgagcgccgggtcgtccaggatcacttcaagcacctccggagtcggacctttgtccgcggccggcagcagccgctcgtgcgcctcctcctccactttggagcattcacctgctcgctatttccgacgggctctgtcgtactaactcacctttgccctcctactcctccttttctccttgcttgcttctttagcaaccgggttcgacgttcaagaagtggccgcccattgcggagcggatccctttcttcaacctcaagcgaggcgacagggtccgcatcatcgctggccacgagtcgctcaagtggcttacgccgaaagagcagctgatgagcagccgaaagacagcagaggagcgcattgagcgcagccgcgagaccgctgcggccaagaacgagaccatctctgaagagacggagaaggcctgggcgctcgagctggccgaggccgaggagagtggtcggcgcgaggccgaggatcgcgcggctaacggcgtcgaggaggagcgtcacccgaggatctttaccatcaagcggatcgacaaggcccgagccgaggtctacctcgacggccttcacgttcgtcctcagattgcgctgccactgcccactgatttgaggcctgtcggtcgcggccgttgctgatcttctccgtcctcggctacgcccgacctgccagtacgacgagctacccgaggtgcccgacaagcgccagcccaaccagacgcgccgcgtcgagattcctattcactacagccagctccagttgcggatccccgataaggccgtcgaacgctttgcgaatgagcttcgcgccgccggtgtcgagatctcggccgaccagctgccaaaggagtgcgtgtctttcatctgtcgcctcaacccgctggcgctcggcagggaactttccgcgcacgtaagctaaccagatgcctctccgaccgctaccgtgtctgcagcgttttcgccgttcggatggagacgcgccacgtccgtgcgccagacgggcggaccaagcgcttccggtgggagagcagcgaaatgctttcgctcaccgaggcgtccaactcggtggccggccagcgtcgggccgagggtcgcgtccagagggcagagcgtctgctcgcagagtttgaggccgccgagcaggggatcgaggtcgagcggtccacggtcgagaagcgcgtccttgtccgccggctcggaagtgagtcgtttgagcctgtcgtcgtcgaggccgatgcggccggatccgcccagcagcaggtcgagagggtccaggtcgaccagaccatcgacacgacgacaggcaccgttctcggctcggtccccgtgccgccgcggaccatttaccagcccaagcgcttttcgtgggaccgggtcgtgctcgagacgtacccgcgtctgaacgtcccgtcggttgtccgccgtgttcgcgtcgacgagacggccgacgaggtccgctacgaggaggttgagcagaagcccaagattacgcttagggccacggcgaacgacagaaagcggttgtccggccacgaatgtgagtttccttttccgcctggccagctcttagcatcgccctctacccagcttctgccggggacattagtcgatcaagagctgacgatccccctatacttcgatacttcatcagcgacggcgcgcgacaccccaagtgaaattgtcgccagcgtttcgtggtcgccgccgtcagtcgaggacttgcaaaacgccgtgaccgaggcgtcgttgtcgtcgccaagcggttcgtcgtcaacgccggaccggtacctcgatagccgtaaagcacggacgagcggagactttttcgacggcggagacgcggacgctgccgcggacacgcttccgatcgagcgcttcatgcacaaggagctcgcaaacccgtacggcaaggacaagcttgccaaggcccggcttgcgcgcgcgcgcaaggcagccgatgaccaagccaactttgtttccgacctggtcggcgctcacctcgtccgcgagcgtcgcgtcctgcacgggattgagccccgggtcggccgcaagcagtcggtcgacgaggtcatcctgaccgctcgccggcggtgggccgagctcgtcaccgcccgccgggccgaggagaaggctgcgttccaggtccggcaccgcgagaagtggggtccaagcaagacggagaagaaggcggtgcgtaaggcgcacaagaagtcgctcctcaccgaccagctccggcagacgacgctcctgcccggcaagaaccaggtgcgcggccctgtcttgatgcctctcatctcttcgcccgctaacgccctgctgtgtctcgctcttaaatccaggtcatccccgtcggccttcagcggttcgagaccgacgcgccgaggtaagaggaggctcgaggggtcgtgtcgcacagatctcatgcttcgcctcacgcctgacttttgatgaaagaggtggcacaacatgggatcgggcccaagggcgggggacggagggggttacacggagagcagaggatggagcgcgagagagtgttcgatgggcacgcagtggcataggaggggcaggagagggaggaacgagggggagagcgaaggttgagagggagcaaggacgacgaggcgcagtccggcatgagccaagtcgagaaggtgcgcgagagagagaaagggaaggaaaccggaaccgttggctttggcttgagttcgctcaggcagcgctggcggttgacgtccggagctcggccgtcagcgcgacgccgccgagccaactccaccagccgcgcttcggctcgttctcggctgagccaacgatgtgctcctcttctggctggccgacaccgaccgaggcgaaggagacgtagccgtcgccaacctcgtgagcacgggcaacgcagcgatcgaggtcgaacgacggctcgcgccttgaagaaggcgacgcaaggtcgtctaggccggcgaggcccactgccgtcacttggccaggcgagggcggagcggtcgtccgtcgctggagcaggggcggctgcgagacactcctcgaagacgatggcgcgcgctcggtcgctcgcgaagccggcagagtcggccgcgcaaagactggcgagcccggtgcggcgagcgagcgcgcgagcgacggcgcggccggagtcgtcagcgcccgaagcgtcgagccaggctgctgcagttgctggcgacgcgcccaggccgcggttgatgacgacgacgacggcatttcggaccggatcgaggtcatcgtcgcgaccgacccgccggcgggtcggtagattgacgaagcgatcgaggaggcggatgagtgagtccgctttttgctcgacccttcgtcgccaaccaccagctcggccgaggtcgcgagctgccctgggtaggccgtcggcagcggcatcgctcttaggccggccgagggcgacagcggaggcggtccgtgttggccggtcggcgtccgtgagccaaatgtggccggagaggaaaccatccgaccctgactcggtcgcttgcggagcgctgccgtcgatgaggtaccgtcccaggtatcgtcgatcatcgcgccatcgccgtaggctgcatacgcctcgccgaggggcgacagacgctcctgctcggcgagaaggaccgcctgcggcacctcctcgcccccatcggcccagcgggcgacttcgcgctccgactcctgcgcggcccgctcacgctcgagcgcggtcgccgcctccatgtcggaccggccaggcgggccgggcagcgtcgcacccctgccgcgcaggaaggtcttgcgcacgcggccgagagtcgtcgttccaacaccgccgatggttgacgtaggccgctcctcgagccggccgaggacgtcgcgcagagaacgttcggcgccaagctgggacgaggtacttggctctgagtccggcgtcgacggtacgttctcagacgagaccaccgccatccattctgttcgcggctcctgcggctgccgctgctggccctcggcgggcaggtgcaatgagatccgccgcttcggccgcgcagcagcgcccgatgccgcctcgcgagggctcggccgaggcgaggacgtgaaagagcgctggccggcgaaagtccgcgagcggcaagatgccgccgagctaggccgggccggcatcgggggcgcgtgcggctgagaaaaggcgtctgggagaaatggcgaaggaggggaggtcggcgtgttgggggtgaggtcgcgcaggacgctcgtcgagaccgcgcgctggagctcagacccggcgcccgcagggggtgcgacaacgagagatcgctcggccttaggcgagtacagatcatttctctgaggactctgccagcctgcttctgccggtttctgcggcttatatgacgagggcgagaacggcggccttgcggctgacgcgagacgaggcgtcccgggtgagcgaggggttgaaaggccgccggtcggtcttgcggccgcgctcctcgtcgaagccgccgacaaggaccgtcggagcgtttcgttcagcctgggtgcggaggggcggagaacgagcgcggaaggatgcgtcagctctgggtctcgtcgagcgcggcgacccccaagcgcgagctggaggtgagaccgggtacgtacctcgtctcgcccctgcttggccgggaggtctcgccgggcgaggcatcgccgccggtcttgcttcgcgtccgtcgcattggtccggcctcgtcgtcgtcctcgtcgtctgcgatgctcctcgagcgcgagggcgggcgttcgacgtctgagcttgcgggagagttggcaccgagcgtgagctggcgagccggccgcgggcggcggagcgacgagcccggcttggtcgtcgtcgtcgtcgtcgtcgtcgtcgtcgtcgtcgttggcggcagcggcgcgggcgaggtcggtggtgagaggagcatgcttgccggcttgaggaggaagcaaggcgaggtggctgtcggggagggtggggcagagcgcgttggggcaccccaatccccatctgtgctcggcccctccagccctctttcatcgcgcgccactcccttccccgaccctcttcctcgtttctctgaactccatgtctattactctttgatctcgcgggcgccgtcgtgaagatggaagactaagctagacgtcccggcccgtcgtcctcgtcgtcctcgctctcggtcgccgacgtcatctcgtcgtcgtcgtcctcgtcctcgtcgtcgtcctcgtcctccgacccgctagcgctctccatctcgctatcctcctcctcaaccccgccgccggccaccgccaagctccgctcgacgacctcccacccctcctttgcaaacccatcgacaagctcctgatgtttgcccggcgcgcacgcaagcgcgagcacgctcgactcgggcttgaagagcgggaggtagtacttctccaacactccgacaatctcacttttcgtgacggattggacggcagtgaggaaatcgcggccaaacgtcgacgggacgagcttgagcgactcgttgatgaacgccgtcgacgctgctgcagccggcgtcttttctttccgggccgaggcgaagacgagcgatgatttggcggcggtgatgatggattgctcgaggtcgatctgttcgggcgagagaaaaggagagggattagaagggagagaagagggagagaagagggagagaagagggagagaagagggagagaagagggagggaagagggagaggggaggaagaaaggagggacggaccgtgcctgaggcgagacctgagatgacgcggccggcctctttgaaggccgtgtaggcgttgggcgactggcaagcgcgggagagagagagagagagagagagagagagagagtcagccggctggagggccttcgttggacgaagggagagcgggagagagcatcgcaccctgtagacgtagaagccaacggtgccagcctcgacgctcgccgtcacgcccgcgccgtacgcgagcccgctcccgcggatgtacttccagaggtagctctcgagcgcgttcatcaccgccttggtcacctcgagcgctgcgagctctgggtggtcccagcctgcgataccccggccggtcacttgcgcgtaggacccttcgatcgacgctagctgggcaatcgcgcatgttcgggccggcgagcggccgacggacgagagggcgaggcgtgagaagggcgtcgggccgaggggcgtgggtgggagcgcggggaaggcggcggaccagggcgagcgagggaaagggagctggaggatcgagccggagatggcgatccggatgttttcaggcttggtaactggccgcaagcaagaagggcaagcgtgtcaatcaggaggggtaaggagggaggggggagagagagggatcgcactctccgcccggaaagcctcgaggtcggcgacaacgcccgccgggtcgtccttgatgcgccttgcgagctcgggcagaaactcgatctgcctcagcagaccattgctcaccgccgtgcttttctcctcgtcaaagacgagcgcccggctcatcgcctgcgacacgccgtctccgtcccgcttgcgctgcggcagctcctgccggagcttcgcgaccgacacttcgagccgatcgagcgcaaaggtcgacgaccagacgaggtcgcgcagccagcggacagacgaggcgtactgctcgcgctcgaccttgagctgaatccggaggaggtcttcgcagatgccgcccgcgccgtcgtcggtaaagtactcgaccgtctcgctgcgggaggcaggaagcgttggtgtcagctgagagcggaggttgctgggcagaagagcgcggggccgcactcgttcagctgggtgatgacctgctcgtgcgagagctcgctcccgtctgcccgagtgaccgggagcgagaagaacgagtcctgccaaatcgcggcgtagctggaagaagggccgaggggtcagccaaaggcgtgcggtcggatgtctcgcgacgggcaactcacggtcggaggtgcgcgggcatgttggccgacgacaggaagaggtcaagcgcgtagaagttggactgcgagcggagcaaggcaggcagtcagcaagagaatgggccgagacgagcgctgccgagcggggagcggacctttgtgttcgcaaagtgcatgtggaacggcgcaacctcgccgtcagcgtcgatatgcttctggattgggcccgagccgggcgccggcttgagagggtcgttgacggccgtctcgacctcgatccacgtcacgctcttgacctgcgaacgagcgtgtcagtgagtggcgtgattcaggaggggagagcagaagaaggactgacgtcgggcacgccaaacgagtcgaggacctcgcttgggatgtcgcggtcgttgaacgcctttgcgagccggagcgcctcctccttggacttgaggccggcctcgccgagcgccgtcttctgcgccttgattcgggccttttcggccttttcgacctgcttggcgagcgcggccgagggcttgccgttgatcgttatggtcggcgcgtcaacgaggtacctgccacgggagagacgcctgtcagcccttgcggaaaagggagctagcgaacaacgggagccggtgcacctccggaggaacgaggtccattgctcggccgtccaggcgccaagggtgtcatactggtgcgggatctgccacgtttcctcgagctgcttgccctcgtcgtcgccatacaagaggtctgtgaggcggggtgtcagtgtcttcggcgagagcaggagcgacgcaagcgaggaccgacctccgatggcgctctgctcgaccatgctctctggccggccctcaagcgagtgcatgacctgccgccgctcgcgccgaaggaccatcgccatccggcccatgtcgatgccttcttcgctgatccgccggagctcggcccggacgaggccggagatgctatcgaggtgctcgaccgggacgtctgagatgtagagcgtcatctcgttgaccgggtgccgggtcgccgtgtagagatcgatcgccgtgcagaagggcgcaggaatctcgacaaaggccttgttgaggggcgcgatcggcgagtcagtcaggtaggtcgtgagcactgcggcgggcacaatgggacgtcatcagcgacctctctcgaccaggaaatcacttgtaggcatcgggtgcaccatcaatggcgaggcagtcgacccagttggtccgggccacgccatcgccaaacgacacctggacctcgccgaccgactcgtcgctctccataaagtcaacgacctcgacccggtcccccttcggccagctgacgccctggccggtcgtcgtctcgaggaaaggccgcttccagtcggccgtccgcgccggcgggtgggcgaggatcgagggctcgacgaccgtgttgagcgtgtggaggagcgcgtcgagcgggcacgagacgccgacgacaaggagcgtcagattgtgcggcacgtagaggctcgcgtggtactcgcggactgccagtggagagaagggcacctggtcagcagccgcagttggggggcatcaacgaaagcggacgcactctgctcgaccgtcaggtcgcgcagggccgacatgacgccgcccgtctcgctccgataggcgttcgactcggggtagatcatcctctgcatcctgcacatcgggagcatcaagattcaggagtcagtcttgaagcgaggcgcgctcgctagcgcaggcaactcacttgagcgccatcaagtcgctgctgccgttctcccgagcctgcatctcggcatagacgacaccggcattctcaccctggccgtcgacgtggtggacctcggtcgtgaagccctcgtccgtcagattcgggtactgcgagcgacggcggggaggcacgtcagtctccggtcggtcgtctacttccaaaaaagagcgaacacgcacgagaatgtggtcgacgtagacgggcaggatcttgaggaaaccctcgccaccggcacagccaatcgtgtaggctgcgttgaccagcctgtgaggtcagctcgcgtgccgcaaagtgtcgagcggaagctccccgacgcacccgtgtggtccgtgtcagtccaggcattcgtcccgtcggcaaagctcttgttggcgaggttgtcgaggatgcccttgtacggatactgctccgagccgagaaagacgaggtgttcgagcgtatgcggacggcctgcgaacggggacaagcgtcagctccaaacgacgctaaagggcagctccttcaaatgagcgcacccgtgtcgtcaaagatttctgttccgaggacaaagctgccattgacgatcgggccctcgatgcccgcccagacgaccgagaggcccgtcttggtcgaccgccacttctggatcggcgtcgacgactttggcggcgtgaacgaggtgactgcggccggagggaggcgaaggtcagcgagggagctcgccagcgagcgacgcctgagagctgtgacaagatggagcccggcagcgcacctcgggcaaagttgccatacacggtctgatcgtccgctaggggcgggatctcggctggcgaggcggcggttgacatgctgcgaaggcttgtcggtcgagggcgtggcgagcgcgggaggccgtgctgagggcgagaagcgaaggcggcgcgagcgaacggcttggacagaagagcgagtgaaggagtgaggaggcaccggaagggttcgccgagcatgcagagggccgcgttcggcctgggaaattaagctgtcgctggtgtgaggaggatgaggcggtcggagagcgcaggcgatgatagtcgttgtccgctgaggcgaacgagacttcgaaacctcgtgcttgtgccggtccgtgaggaggtttgtccgaccagctcaacctcaagcgagagtcggtatagcgaaagcacctcaagggagagcacgacaaagaggtcctcgactttgctctgcgcaggagatgatgaattattcgaggtgcttgctgctctcgtcggagggagctcctcctcctcgaaggctccgacctgcgcgggccctacgagagctgactccaaggccccccttgtcggctttagcagattcagcaggtggtagactacaatacacaggcttcgtaggagctggaagagtctgagtcgtcgtacgaggcagccctcccgacagtcctgccggcctggctgctgctactgctgcgcctgacgtcggctctcgccttgctctcgcgctggaggtcggccgcccccttcgccctgaaacctcaaccatctctcctcctcttccgcccttccttgacccaagacccatttcaagccagctcatcatggacgacagtcagtcgtgtccagccgctcgtctgtccgcttgcccgccctggtcgctgacactgcccgccgcgccgccagacatcgccctctttgtcggcgtgacgtcggcttcagcaaccgacgcccggtcctacctcgagcaggctggcggcgacgtcgaggtcattagtccggcgctcgctggtcgagagcgatcgttttgagggactgacatctgctgcttgctctgccagaccgccatcgcctcgttctacgccgctcaggacgagccaagcgaggctgcagctgctcttgcgccgacgtccggcaccctctctggcgctcctgccccttcggccgctgcagccgccgctccggcgccctcgagcgggccacgaacgctcggtggaggagcggccgagcctctgcccgagggctggggcggacgctcgactggagggaccggcgcccgtgtcggtcgggtcggccagtggggatcggccggaggcagcgggtgcgcacgagacccattcgtgcctctcctcgataacgcgctgatcgctcgtcctgctcccctctacttatggcagagcttcgacgccccgctcgaccggctcgggaccgcgcatcggcacactcggttcgctcggcggcggctcgtcgcgcccgcccatcggtgacgacagctcggtacgcctgccaggctcgctgcgacgtccctctcatttactgatgcctcacgccttcttggtgacaggacgatgacgagcccgacctctacgccggtggcgagcgcaggtgcggctttcgcctccttgcgtgacccgacccctctctcatcggcgctgacctctctcctatttatcgtacagcggcctgaacgtccaaaaccccaaccggccagaccgtgcgcctggaggcagcgatgtcgcacgcgaaatcctgcgcaaggcagccgaggctggcgagccgccctcgctcgccggtggagctgacggcgccgggccatcctcttcgggaccgtcatggggtcggggccagacgctcggtgccgacgctgcagcagagggcgagatggaggccgacgaggaggaggaggatgaggacgcgcaggacgaggaggtcgtcgtccgtcacctgacgttctggcgcgacggcttctcgatcgaggatggcgagcttcggcggtacgacgacccgctgtcgaaggctgtcctcgacgcgatcaacaacgggtgcggctcttccctgtcttgctatgcctcgctcggctgccgttgcgctgaaaccctcctgctccttctgtgcccttccgcgttggcaggactgcgccgccgagcatcctcaacgtccggatcggccaggcggtcgaggtccgcgtgtcgaagcggctcagcgaggactacgtgcctccgcccccgccccctcgtgggccatttgagggagcaggtccgtcgtcgagccgtctggcctggctctggccgtgcgagtctgggctgatgtcggactctccctcacaggcaaccggctcggcgcacctgtccccggcgtcgcttcgtcaccgtcgtcgactaacaccgccgtccctaatgccttcccgaccggctcgaccgcgacaaccgccgctgtccccgcccccgttgccgagaaggcgcccgagtttgcggtcgaccacacgcagccgacgacgagcgtccagatccggcttggcgacggcacgcggctcgtcgctcgggtcaacctgacccacaccgtgcgcgacatccggggcttcatcgacgcgtgcgtgtcgctggcctttcacctgctgggtgttcggatgtgtgcgccagtcgagctgacggccccttgcgctcgtcacttggcagctcgcgaccggcatcctcggccggccggtcgtacgcccttcagacgacgttccccaaccgggatctcgccgacgaggcccagacgattgccgagggcaagctctcgaacgccgtcgtcgtccagcgctggatctgaggggcaccttcggccccaggtgacccgctcttctaccacctctctcgtcctacgctatcgatagacgtattccctccgacatagcgcgaccgacgtgattagcgagagcagtgagcagagcagggccggctggcgcaactccctttcgaccggcagctcgtttggttctggcgactgaggcagacgcagctgttggcggcggccaaccccagccgctcgtgtcttaattgacgatcctgcgagtcgagttggaaggtggttgcgacaggtgaccctgctgcgaatgcgtactcggccggggggcgactcggagcttctggcggtttcctgcgcgtcagagcgcggagccatctcgacccggacgacgacgacgaccagcgacgatcagcagcagcgacacacccattcacaactcactcttctctaagcaccaccaacatggccgacgacaagttctaccgcgtcctcggcgtctccaaggtgcgtcgccgcaagcgggtgaagcaaggctgccgccgggacgctgcagcgaggtcgtctgaggccaggcttcactctgcggcccggtcctcgacgctcgcctgacctcgagggccacgtcgctcgtcggcaaccacctgctctgcgtgctgactctctctgctcgtgtcgtgtgccgctctctgctgcttcctcgatctaggacggtgcgtgaactgccctcgccggtcacttcccgaacgaggccgcctcgagctgaccctggcctcaccctccgttgcctcctgcagcgagtgacgacgagatcaagaaggcgtacaagaaggctgtatgtccagcgaaagcggtgcccttcttaccttccgctcgggcgcaaggcgctgacctcggccttgaccgacatccaggctctcaagcaccacccggaccgaaaccagggctccgaggccgcctcgaagaagttcaaggaggtgcgcctcattctgcgtagagagactgctgtctttcgcccgctgatcatgtcgctttctgtgctcccaggtttccgaggcgtttgaggtcctgtccgactctgtgcgtcgacccgcctacttacccttgagttctggtcagggcatgggatgactgaccgcttccaacccgatcaccagaacaagcgcgcaatctacgacgagtacggagaggaggcgcttaagtcgggcgcgcctccgccgggctctggcggctttggcggcggcttccctggcggcggaggcggcttccacggcggaggcggcatgggtggcggcggcatgggtggcggcggcatggaggacatcctgaagtgagtcgcctcctcgctcaagccctcaagcgtcgtgactgatctccgtcgttctgcagcatgttcatgaaccagggcggcggcggaggcggcggccggggtggcggcaacccctttggcggcggcggcatggacgactttggcggcggtggcttcggtggcatgcccggtgccggcggcggtcgctcgcgtcagccggaacccaagcccaagccggaagacatcaaccggccgctgccggtcgcgctcgaggacctcttcaacggcgcgacaaagaagctcaagatcacccgccggctgctctcgggcgacgagcaggagaagattgtcaccgtccaggtcaagcctgggtggaaggcagggaccaaagtccgctttgacgggctcgggaccgaggtccggggcggaccctcggccgacgtcgtctgtgcgtcctgccacccccgctagagcttgcgttttggccgctgacccacttgtcgtctctttctcggcagtcgtcatcgaggagaaggcgcacccagtctacaagcggcaggacaacgacctcattgcgacactcgacatgccgctcatcgaggcgctgaccgagaccaagccgcgaacgctcaagctgctcgacggaacgacgctcaacgtgcccgtgccctcggccccggttcagccgcaccgcgagacgcggctgcccgagcagggcatgcccatctccaaggcgggcgccaagaagcgccgtggcgacctgattgtcaagtggaacgtcgtcttcccgcagagcctgacggccgagcagaaggccgagctcaggcgcattcttgcgtaagtgctcgcacgcaggcaggcggggaaggagggcaggcgccgttgggacgggcccgcgacggggacgatgacgacccatcacgatagattcatcttttctctttcagcacgggcgatgtccggggcagtgggtgcgggcgacggaggcgcagtgggtgggccggggtagcacagacggcggagaccatttgcgcagggtaaccgagtgtcgcgggtctagaaatggcgcgtgaaatacaacgaggtaagagaggccaggcctgtcctttggagccgggctgcctttacttggcgaccgccggcttccggtagtaagagaccggcgtgaagggcatcttggcgacctcggcgtcgcggagcttcttgcgaacgagcacactgagcgccatccccgactttttgaagctctcgccgacgtagcccatcgcgatgttctggccggttgtcgggctcgggatgcccgaggtgacggtcccgatcgcctcgctctcggccgggacgggtgcgcctgccggctgacgggggaaaatgagggcaccctcgcgggcaggcgcaccgttgacgacgaggccgacgcgccgccgggttgggggcgtctttggcgagaggtgggcgaggatggccgacttgcccgggaactctggggcgtcggccgcgcggcgcgacttgcctgcgaggcgagtgaaggatggcgggcgttagcgacagaggggtgaggctccatcgtcaagggcgccgccgactgactgatgacccaagcgagaccggcctcgaccgggttgatcccttcgttcaggtcgtggccgtagaggcacatgccggcctcgagccggagcgagtcgcgcgcgccgaggccaatcagctcgacggcagcctcctcgcttccctcaagcggggtccggacgatcgcatccgccacggcgaccgtgtcctcggctgggatcgaaacctcgaagccgtcctcgccggtgtagccgccacgggcgatgtggatgcggacggtgccgctcacaccggcgccggggacactgaactgcgcaaaggtcgcctggccgaagtagagcgtcgacaggtcgacgtcgacgtgcttttgaagcacggcctgcgacttgggacctgggagggagggcgaatgtcagggtcagctttggacggagggagtcgggcgacaggaggaatgcgggctgaccctggagggcgacgagaccccagccgtcgaggacctcaaactcgaccgcctgctcggcaccgccgtgagtcttgctccactcggcgagcttctctcggaagagggcgaggtcctcgatccgccggccggcgttggtgacaacgtaaaacgtctctgcgtcgtgctttgtgatgatcgtgtcgtcgacgatgccgccggccttgttgaggagcaccgtcagcccgccctcgcccttgccgagcgcgccgaggtcagtcgggcagagcgactcgagaaaggcctgagcgcccgggccgcgaaagaacgactggaccatgtgaccgacgtcaaagagaccggcgtgcgtccggacgtgagcgtgcggcgagaggccagacgtcggcgggaccgcgtacgagagcggcatcagatagccggcaaacggcaccatcttggcgcccttctggacatggtagtcatgcagcggcgtcttgccgaggtcggcctaaaagagagagtgaggctccgctcgtcagctcctgctgcaggaggaagggaccgagagatggtcggcgagctcgggggacgcaccgacgagggcaagacgtcggcgtacgaccggcgaccggccgagggttcagtagcggcagcagcccgatgagcaccgtgcgggaccgccagggcggcaggagcttggacggcgtatggccggcggtatgaagaggcgaggcgaccggcggcggaagcagcggcaggcaggcgcgaggcaggcgcggccgaagcggcgacagtccggcggacggcgatagaggcgagcgagagggcgagcatggcgggcgagggaagtcaaagggaggaggaggtactggtcgacagaaaggaaagctgtcttgcgaggcgctgctctttaaggccccgtctcgacagcttgacggcgtgcgaggagaggcgaccgagtcgtctctgccggctcatctcggtcccgacgatcaccgcgactccgccaggaagcgctcggctgatggtcgcccgctgatgcgacgcgggcagcttctagtcgactcctgatttgcacaagatgcaagacggccaacgaacgacatagagatggaggaagatggaggcagacaaagagacggccgccaacgacgacgtcgtcggaggtcgccgggagaccgatcgagggttcgcgcgctcttggcctcggcagttcgctggtcacatgtcggcgctcatgccttcgccgtcgttgagcttcagcttgagttcgtagaggccaaactcgtcgaatctggacctgctcagtcggagaaagcgtcagcaggctggtcgcaagggcgagagggagcgcgcagtcgacgcactcgcgacaccgagttcggcaggcggcgagtgtctcctcctcctggcttcgacaaggagacatggaagatgtcagtctcccacggggcgtgacgcccgacgtttgacggcatcgtacctagatcttgtccagattagacggcgcattggccgcagcctggaccgagcgcgaaagagcgacatggagggcaatcttgaagttaaggcgcttctcgtcgaaccaatcgactcgccgacccagacggtcttgtcggtctcggtcgtcgcggtcgacgcagtcttctgggcggcggcgacaaatcgcagctgatcgtcgtcgtgcactgtctggacgagcagccagtaaacacggagaacgtcgcggaccgtcacatcctgggcattgtccgccgagtagacgccgaacgcgccagcaaagaagtggacgacgcagcgagtgaccggtggcgatgtcgccttctcgtcaaacacggccgcgcacgacgccatccccaagcccgccagcacgagctcgcccgtggccggattcgtgcgcgtcggtgcgatatcgacgatgagctcccggctgtgctcggccgtcatgaaccagccgataccctccttaaaagtgggtgaagaacggccggacgcttggcatcgatgatgtcggcccggcggacggtcggctcgaggaagcgtgtcgcatagagagaggggtcggccgccagccaccggaaggacatactgagcccggcgacagtgagaagcgcggcgtagctacaccttcgaaggatctcgagccagacctcctcaggtagcgccggccaggagggtgggagctgctgggcgaccgaaggctcgccgagcagccgacggaaggcatggttaacctgtttgacagagcgggcgagcggaggcgcgtcgagttggccgagggtggcagaccagacgtggagtggcagcggcggtcgcgagagctggatcgggtgatccatggccgaaaggagggtgttaggcaggtcgagtggccgtcggagggagcgattgatggcagacaaagggggagggctcgggtcgagagtccttctcctcctcctccccttcctcgctcacgctcgcgcccttcgctccccccgccccgccactcatcaccgccgtcacgcgctaccgccagtcctcggggctcaagaccgagtaccggctcgcactcgatccaggggtgttcgtcgaggaagtcagggcggtcgttgacgacgaggatgaggcgggaagggtggcggcggcgacgacgacgacggcggggggtgaggttgggcttgacggcgaggaggtcgtcgacgacgacgactcgagctccgactcgcagtacctaccttcaagctcccagcagcagccctcgaactcgcaagccccctccgccgccgccgccgccactgctgctgccggcaagaagaagccggccaacaagtcgctcgcggccccaccgctcgcgccgctcctcctctggctgccgtttaagctcgtcaagcacacccatccggcgctctgcgctgcgttcgagcgaggcgtcgaggagaagcttgctagggaggcggagaaggcgcagcgcgcggcggaccgggcgaacggcgtcgttcgactacggacggcggcggcggcggggtcgccgatgaaaaagccgccggtggagaagacgccggtcgtgaaaggccaggcgaagaaggccgagtacgacatcgacctcgacaagacagaccgggacgcggccaagatcgcggcgaacattgcgggtcggtcacgctcgcctgtcaaactgtctgctgctgcgcgctcgtcgtcgtcgtcgtcgtcgtcctcggcggcggcgataacggacgttgtcggtccagcaacaagggtccctcgagcacggccgaaatcgacaaagcagccgccggcgtacgtcgagctctccgactcgtcctcctcctccgacggcgacggctcttccccggcccgctggcgcgcgtcaggcagcccacccgccgatacggcacttctcactccacggcggctggcggtcggcccatgtccgctcgggcctgaagaggacgggacggtcaagcgtccctcgcgaaggcgggccgtgtcggactcgcctggcatgctcgggccggcagcgaccgcagggagcagcacgagcgcgaccagcagcagcagcagcacgagcgaaagtgcaaaaagcggcaacccgtcgccgacaaagaaggtccgctcgccgccgccgccgccgctcgctctgccgccgctgcagcaaaagggcaagcagagggccgtcttgtcttcctctgacgaggaggagaacgacggcagcgaaggggacgccagcttcacgttcccggctcggccgctcgatgagtgggcgcggcggcgggaggcggagaaggcgaggacggcgtcggcgtctgcgtcggcgctgctgccgctgccgccgttgccggtcggcacgacaaggccgcaggcgcttagcgccggacgggacgtcggctcgccgccgttgtcgtcgtcgtcgtcgtcgtcgtcaaaggccggttcgtcccggtctcccacgagccaagcgcaggcccgagccggaagacgcgagcggtcggcgagcgcgttttcagccaacagcagcgacaccagattcggtggcggccatgatggcggacgacgacgaccggccgtcgtcgacgtcgaggtgatcgagctcgataagagtcccgtcttgccggcgcgaatggcacggacgacccgaccgacgacgacggcgacggcggcaatggcggcagcaaaggcgacaaaggtgaaggctactgctcggccgccgacgatgcggacgagccgctcgaccacgccctctggctcgacgacgtcggcctctgccgagctcgccgggagcgctctcgagcggaaaagcagcaacccctggtcaaaatcttgtcgaccgcaaccgccgccgctggcagccgctgcaacgacaacaacgacgacgacgacggcgacgacgatgaccggtacggggaggccgagacaaggccaggtcgaagtgatcgacttgacagacgacgattgaccgcttgcttgcgcgtcgcgcgcgttgcgtcgtcggtcgtcgtcgttgctgtcgggcagcgaatgtccgtcctctgctcctcgcatttttcaactcgctcctcggacacctcaaacgaccggcccttgacgagcttgagcgcacccgaggtggcgtcttcgaggacgttggcgagcgttgcgcttgcgatggggaggccggttatgcggagattagcgcgggctcggccgccaaaggcctcgtacagcctacgacagaggtggggagacgtcagacagggcagctggcagcaagagcaagcgaggagacggaccggacgatgatgtgccgcttggcattcttgcctccggccacgtcgccgccggctgcaaagccgtcgtcctcgccccgcttcactgtctcagccaagacgtttggcgcgccctcgacgctgaacgcgcagttgtagacgctcgagccgagggcgttgggagcgagcttttgggcactgagcgtctggaatcggactgcggtaggcgaaggattcggcgtcagcgctcatccgggcctggcctagggagagtgatgggccgacgcacgctgcatggggctgttgaaggcctggccgatggcgggcaggtcgctagcagccagtcgggagatgtccgtcagtcaaccgtaggtggcagacaccaagcaccgagaaggaggcacgcacgactgggcaaagtttccgacgtgcgggacgatcgcaaaggaaaactgatggaggccctggtcctgctctgcatcgggcgcagtcgggctccggagaagactaagcctgatcgtcttgccctcaatgccgtaaccgtacttgcagtcgttgatgacggcgacgccgtagccaaactcgctcaggtccgcaaagcggtgagcgcagacctcaaactttgcctggtcccaagacgtgttgcggtgcgtcggccggctgacggtgccgaattgcgtctcgtacgtcgcgtccatcgcgtggatgtcgaccggcagctcaactgtagaagcgacgcgaggcggaggaggtcaggccgagacggctggcggctctcctgtgggtaacgaggaacgcacacttgaggaactcgtgccgctgccgccagtcgacgtcgcagtcgaagcggaccatcgaccggctgtccttcgcgagcgaagcgccgaccgcgtcgatcgagatctgtagaagcggcagcagggaagtcagtcgaactgcgcggctgcctcgacagcctcgctcgcagactcaccgtgcagttgaagcgcgtcgcgccgagccggaccttggccgagagcgaggcccgaagagggccgacctcggcaatgctgaccgactcaaacttgagctgcaggacggagcggtgagccgtcagcgatcgcaagctgacgacacaggaaccagaacgacgtacctgccgaccggtctcgaggtggaaaatctcggtatcccaggcgtccctggcaagaggaagagtcgacgaggttagtgaacgatacaagtgacgttacgtctggccctcgacggaccagtaattgggcgtatcccggaagatgacgagcccgcccgtctggccctcggggatcagctcgcgaccgagcttgcagtcaacgaggctcgcgatccggccgtcgcgcatcgtgagctcgatcgtctcgctccgaatcttgaactcgtcctttgccgtctgctcggccttgaccggggcgaggtcggcaaagaggccgcggacctcgccgacgccagcgtcagcctcggccgagacgagcatgaagccgtccttgcctccgctcgcgacctggctgcagtgcgccttgagctggctccggccgtcgagcgggacgcggacgacctcggtccgggcgatgcggagcgggttgagcgcgagcagcttgcccttctgccggaggtcggccatggcgaggggcgagccgagcgagagcgcctcgtgcgccttttcggtcaggtgcgtgcagcgcttgacaatctccgcgtagaaggcgtcgagctcgtcataggcgagacggatcgccgagcctgcaaggacgagaagagcctcacagagtcaggactcgaaacattagacgggccggccagcggtggggcgcaacgcaccgggcagcgtgtcgtggaactggcagagcaggagttgctcccagcaccagtcgaggtccttctttgggtactcgtacgacgggtcaccaaggatcgaggcgagcgtcgccgcgtactcgaggtccttgaggaggtactcgctgccaaggatcccgaagcgtcagtcaaggcgagaccgaccaagtgctaaagaagcagacgcacttcttgcggttgcccttcttcacgggcgcgtgcgacgtgtacgtgccgcggtgcagctcaaagtagagctctccatgcctgtatgtttgagcggggtcagtcgtcggcaccctcgtcgctccaagcaagcgcgcagtaacgtaccaggtcggcagctttgacccgtccttggtccgcttctggagacgggcaaaaaagtcgtccatctggccgccgagcgagatgagcgggacctcgcggttcttctcgccgaggctccggagccggcgcatctgcgagcggaggttgcttgcaagcaatcagcacggatcgtcagagaagggagggaaagcgagggccttaccctctcgagcatcggtgcagtcggcccgcctccgccatcaccattgccaaagagaaagagggcgtcgcccgtcacctcaaggttcttgttattctcggcgcccttcttgagctcgccgaagtcgacctgggcgttgtagctacggacgtgagcgagtgttagcagctgcggccggggtgagtagaagagcggaaggacggttacgtgtcgaccggggtcatgtgcgtcaggacctgggtgccgtcaaggccggcccagttaaaggacgagtggggaaacttgttgatgttgttccacgacagcttctgggtgaaaaagtagtcgcagccggcactccgggcaatctgcggcagctgcgacgagtagccaaacgtgtcgggaaggacaaacgtcttgcagcgcgcgccaaagcgcgactcaaagaagcgctggccgtatagaaactggcggataagcgattcgccgctcggcaggttcgtgtccatctcgacccaggtgcctggaggagtgccgcctcagtgaccgatctggacgtcgagacagggaattagagacgcaccgccgatgatgccgaagcggccgtcgtcgaccttcgccttgacccggtcaaagaggagcgggtagaggtcctgaagccacttgtactgggctgcgctcgtcgccgaaaagcggtgctccgggaaatggtccatcaggtagacctgagacgaccacgagcgggcgaccttcttcttggttgacgcaaacggccagagccaggccgagtcgatgtggcagtggccgagagcaaagacggcggcctcggcgttctgctcagctttggcctcccagtcgccaaggacctccttggcgagctcgagcccgcgccggatcgacgagccgtcgtcgttggggacaaagacgttgatgatttcgttggcggcgtacatggcccgctggccgagcgccgagtcggtcgcgctctcggcgatctgcttgaggatcgtgaacgactggaggagcgcgtgcgcctcgacgttgggcgcgacgagcgcggccttgttgagcttgaagtagcgattcggctagagcgggcagggcagaaggcggcaagcggggggtgtgtgagcgacggagggggtggtgcgcagcagaaggaggggcaatcacgtcgggcggctggatctctgccccgccctgagggacgccaaacatgccgttgcacgagatctcgataaagaagtgactcgtcgccccgggcttgcgagcggcgccctcgaggacgtattcgacccggcggaggttgtcaaagccgccgacgagcgcgtggacggggacgccctcgggcgtaaagatgaggccctcgcagtcagggtcaaactcaaactggacgcgctcgtagtcccgccacgacttggggaccgtcagcgagaccttgaaccagtggttggaccaggacggcccaaactcgtcgccgaccttggccggcttgtagtgggcccgggcggcctcggcaaaggtcggcgaggtgccggccttgggcgaccagctctcgagcttgacagcctcctttgagccgtcctcggcgaggtagagcgccgacgagaggttgaccgacgagtagtgtctgcgagggaggccagcggcaggcgcgatcgtcagcagcggttggaagtggcgacggatcccggccggtcaaggcgggtgagatggcggcgagcagcttgcgagacgcaccctccggtgaactggccaaaacggccgagggtgatggatgggatgtgtttctgagccgatggcgacgccgggaaggggtgcgtcgggtatgacggcatgctggaggagatgatggtgagagagaggtaggcagcgaggcggggagcagctgaccggcagcggcgtcggcgagagccgatgacttgccggcaggaatgaggtcgagttgatcttcgaccggcctctacctcgcccttgcctcggtcgtcaagtctgtcagggtcgtgctgtcagcctgtagagtccagcagctgttacctctgtcttccctctcagccgtcgctagagggagctggccggtggtgccggagggtaatagtcttgccggtcgtcttaagcacacctggtcgtgaaggaagattcagacgacctgtcgcctgacctggggctgaaagagtaggcactgatcgtattcctctctttctctgctgagcttgaccctggtcgccgcgtactaaggcgatcgtcgttaggtcggccggcggtcagaaaggttgtgctgcgcgctgccttcttcggttcgctgcccgtatcacttaagagaaaacgtctggccatctacagcaatctacaacatctgcggacccagcgaccctctcaggcgtcccacttgccaacctcggcgccaagcaggctccaccagcgcttggcgccgacgacgtcctggtcgctgacgtccttcaagtcaacggtgccggtgccgtcctggatagcgacgtgcgtgagcccgagcgtcagcttgatctgcggctggtcgggcgtgtacatctggagggccggcttgatgtcggcagtcccggcggctgtggcgagggcgacaatattatcggcggcgatctcggcctgattccaggatgctgagggaggcaagaaggagggaggatcagcggctgtttgagaggcaaaggctgatcaagagggacagactgtagccggcctggatcgctccggtatcgcagcagtcgcccgcagcgaaccaccggccgtcctcgatggcatccgccaggtcggggccggacgcgatttgggtcgtaggcaagacgtgtatcaacttagtcgatggattgacggacgacgggaaggacggcaggaggtggtggctgttggggatctggccggtgcacaggagctgccaagccaatggaggtcagcctcagatcgaggggagcgaggcgagaaagtcgagcaggtagaacgtacgacgaggtcacacggaatggccgtccctccggtcgttgtgacgacttttggcgtcagcgagaggtcggagaatccctcgggcgggacgatcgcccgctggccgaggatcagcttgatgtcgagcgcttcgagccgggcgacgactgcgacgtcgccggggggagggaagaggagaggtcagtgacacctggcgacgagcaaaaggacgacgtagtgactgaccctggtcgtgaagctctccgttgaacgaggtcatcatacgctccctcgagtggaggagcgtgacctccatctgtggaaagagcgacttgatgtcggtgctgaattggatgccaagtgcgccgccgccaatgacgagcacaccgccctgcttggctccgtccggccggcctgcggcgatcgtgtcgagcttctgacggatgagggagaggcggccgacgccttccttcttcgagccgttgccggtgaggagtgagatgggcgccgggagggctccgccgagcgcatagagaaggtacttgaacggcagctcgaccggctcggccgacccggcagaaaggagggtcgcgtgcgtcggcgaaaggttaaaaagcgtcgcctgcacgaaggcgtgcggccgcttcactcggccagcgatagggatgactggttgcatgagatggcggaggcatgggtcagtcagagcacggcacaaaaatgaagctgcggagatgacagggcttcctcacaggcctttggggcgtgctcaggcagcagtgcaacgcgcggaaatatgtagacgtctggtaagatccgcggcgagtcagtcgccaactccagctgtgaagggaggaaagcgaggcaagaaaggaccaacgctgaaagtgggacgagcgatccacgaggacgacccgccaaccctcgttgggcgggagccgctcgatgagccggtcggcgccgtggccgcccccgtacgagttgccgaggacaaggatcgtctttttcgacgttcggagctcgtcgagcaggctgtcggcattggcagcagccggagctgagaaagcaggagcggcgaccatggtgcgaggaggagcagaggtgacgaggggaccgggcggcactgaaaacgcgatctgattgactgatcgtcgacgggcgggtcagcctaattggtccgcttttgcgggaagttgaagagcaggacgtgcagctctcgggagagacaagcgaggtcctacggaagtctgtggagggcaacgtcggtcggggggaggtggtgagtgaggggaagagagcgggcgcgctctcggcgcagtcttgtcttctggccgctgcccagcgcccggcagcgatcgtccctcctcggtcgacgtacagcgggcctgacgagacgcaaggcgaacagggaaagagcatggcaggacggccgcgttgctgaatggcccccgctgaggactgacggcaaccttggcggcggcgaggagcagcagcagggcgagtcggcggggcgtcgggcacgtcgttcgtggctcggacaggccgcctgtctctctcactctctctctgcctcatcgtaagcccgccctgtcttcggcttaccttcgtcctctctgtctcatctgccatcggccggacgaccctcttggacgccctttccaagaaggatgggggccttcgtcctcttcctctccctcagagcggctcggtcggctccccccgcgacgctggctgccgtctgcgcggccgcttttacgctgcccgtaaggcgctgcgtaacactcttaccgaaccgcgcgagagaattaggatctggcgcagcgacacccttctccgctgctccccttgcccggccaactctcctccctcactcaccacacagacctccctgcaacgatggccaaggttcgtacctcctgctagctggtcgagcaactgtgcgctgatcttgcatgcgactcgctcctcctccgaccgagcagaagtcgttcaagaaggtgcgtctctccgacccttgcttcgcagcaggccgagcttggccctgctccagctggccgaggcttctcaagacctgacaccttgctgcccaccatctcttagttcgccggcaccggcaagctccgggacgtcatccagtcgcgccggacgcaccagaagcagcgcaagctcgtcgagggccgcgagaagcagaaggcggccaaaaaggcccacgctccgaagggccacggcgcgcccgtcggctcggacgacgaggctggcgaggatgacgacgaggtcgagacggagagcaagggccgcaaaggcaagaaggtggctggggtcgaggacgagagctttatgggcgaggagcttgacgacgatgccgccgacggccagagcgacgacgacgacgacgaggccgccgcagaaggcgacaccgacgacgactttgccgagctcgacgacctcgatggtcagtctcgctgaatccggctctttgtcacgtctcggccgctgacccagctcgtcgtcaatctgctgctgctgcaacagagcttgaggcacagaataaggacgctatggctaacctggccaagaccgaccccgaattctacaagtaccttcaggagaccgacaaggagctcctcgagtttggaaacgagtcggcgggcgagtcctctgaaggcgagcagccggcgccggtcgccaagaaggcagccgtcaagaagggcaagaaggcaccctcgcccgaggccgaggcgctgtcagagtacgaggcgtccgactcggacgacgagtcggagcccgagatggacctcggcgagagcggctcgcgcaagggcaagggccgcgaggagcccgaggttgtcacgatggagctgctcaagcagtggcagaagggcatggtccaggtctgtgatgcttccgtcttacggttgcggcctccttggcgctgacgaaccgttaacgctctcccactctcaccagaaacgttcgctcaagtcgctcaggaggtgcttgctcgcattccgtgcggccgcgtacaacaacaacgaggcgcaggcctcgagcggcaaggcccagacgtttgcctacgagattgacgacccggccgtcttctcaaagctgctcttgacgacgctccactacacgccgaccgttctcggtacacacgctccgttcacgaccaacgcaaagaccggccggccaaagttctcgaagccgccgccgccggcgctaatgaagatggtcctgtcgtatatgagcaacctcatccacctgatcggcacgctgcccgacgtcgagggcgtcgagggcctcgttggaacgtgtgtccgcgagagcgcgcgcatggtgccgtggatcgtcggcggccgcaagatcgtccgggcttacctcaaggtgcgttttctgctgcggcgtccatgtggggccggaatctcaagctgaccgtccttctctctctccttcagatgctgctcgacaactggtcaaccggatccgattcggtccggatcgcctgcttccttgcgattcgcaagctcgtcgccgccgctgacgagggcgtgcgcgacatggtcctcaaggggctctatctgacgctgcttcggagctgcaagcagacgacggtccacaccctgccctcgatcaacctgatgaagaactcggcctccgagatctacacgattgaccaggcgaccgcctacggccacgccttcggctacatccgccagctcgccgtccacctgcgcaactcgatcaaaaccaagaccaaggactcgtacaaggccgtctacaactggcagtttgtccattgcatcgacttttggagcctcgtcctctcgacggcctgcagccgcgaggccaagctcgcccgcggcggcggcgagagcgagctccagcccctcatctacccgctcgtccagattgcgctcggcgtcatccggtgcgtcgtcccgctcaacgatcggtcgcgaccgacgccaacctgctcactggtcgtttcattactttcatgctccccgccagcctcatcccgacgtcgcgcttctttccgctccgcttccaggtggtccggtcgctcctccggctgacggctcagaccgggacgtacatcccgcttgcgccgtcgctgctcgagccgctgtcgtcgtccgagtttacgcagaagcccaagccgtcgtcgttgacgccgctcgactttgagtacgccatccgagcgggcgcccagtacccgcggacgcgcgtctaccaggagggtctcggcgacgagctcgccttcctgctgctcgagcaccaggcgctgctgtcgacctcgatcgcgtttcccgagctcagcctcccggtcgtgctctacctgcgcaagtttgtgaaaaagtgcaagacgcccaaggtgacgacggccttcaagctcgtgattgagaagatggagctcaacggcaagtgggtcgccgaccggcgcaagcaggtcgagttttcgccccgggaccgggccggcgtcgacggctttctcgaggacgtcagcgtcgaggccagcccgctcggcatctactggaagcttcagaagaaggtgcggcccctggacgttttgggctctcttgctccgctgctctgctgacacctccttctcttgcactgatggccaggtccgggagaacaagcggcgcgaggtcgagaaggcggcgcgcgaggagcgcgggcccgaggaggacggctcggatgacgacgagggcggcgagggtttcgagattgaggacatggacgaggacgagctcgagctcgaggaggaggacgagtagaacgacggacgtgatggatcatgaccgtctgttgatcttcttccttcgacattgtggaggactatccaggtaaaggggtcccattttggggtttccaaagtgtgagcgagatcttgttggattgagctcaaatcttgcccagtcggaacagacgacggcacccggttttggatctgtcgcctaaccgaggggtcaatcaggcggttccggtggaatcgaccgggaaagggtgggtgacgcctgcggggggttgggcaaacagtcgtccgacagcagcgagaccggtaccgcttgatagctctcgacgatgcaaccccagatcaagaaaaatggcgaccatccgatcaaagtgtgatcggctagctcaagggggggagtgcgcgcgggtcccggggcccgggtcgctgggctactgcgcccgcgcgcgcggccgcccgcttcgacctgtctccccccttcgctgcctgtcgacgaccaccgacgatcccgagagcagtaagagtgtcaagagggtcagtcctgtccgtgctgtcgtggacggtcgtcgagatgggcagggaaacgggcccgccggtgctgacctaatccccccgccgctcgccgcccgccgccgcctcgctccctcctgcccttctcactgctgttcctagtctcttcgagtctcgctctggagcacgctcagcagcagcctcttcttaacagcagaccgacctcgcccatcatgcgcgaagggacctggcgccggtcgatcgccgacgagttgacccgggcgaggatgtgccggttgcaagctcggtccagtgcgatccgcccatcactcgttagcgagaatcttctcttctcggagccgcacggcgcgaagcccatctcatctcgtcgctctgagatctcgtcgaccgacagacctgcccacccttcccatctcagacggatcgaccttgaccgcactaagcgaagcagtcgcttctcgccgcccttgcggtgcccagttgtatcggcaaggtcaaggctctggacggaagcgacaggcggcgaaggagagccggattgatgaaagtgctgggaagtgtcgacgagttgcggcgagttggtaagccgtaggcttgacgttggccgttgagctgcctctgtcgggaaaaagaggttcggcggtgacgaccgtcgtgccgactcgcagccttcagacgacacggacgcctcgtacccagccgccggccgcgccggttccatacccaccggcgccgacgacccactcgccggccgcaccccaagcaagcccgtcgaccggcccaggcgcatcaaatacggcctttggccgagccggttgcttgttggcggccgcgtccgccgagcttttgctcgttgacccggctgatgaggacggcggagggttggccgggaggatggacacggccaagccggacgaggtgtcaaagagcgagaggagaccgtcgtccgagcctacacaaagcccgccccgactgtcgtgcttggacgacccccaagcgagggcgttgacccggccgccgccgccgacgtagcactcgacgacggccgtgcccgggctgcgcatgtcgagcacctggacagccgagcccgaggcagagaacgtcgcgaggtagttcggatctgacgggttaaaggcgatcttgacaaggccaccgctggcctgggcgccgccggccgaggttgcggccgctgctgtcgatgacgatgccggcggtgcgggcgactcgtagagaatcgtcgagtgctcgagcgagcgcaggtcgaacgcccggagcgagccgtcggcgccgaccgagacgaatatctgagccggcgagttcggcagccactcgacgtcgtagacctccttgtcgtgcgcaatcagctgcgtcaccgcaacgtgctgattgacgtcccagacggtgcaggttgtgtcgatcgacgaggtgacgaccatcgccggattgaaggcgttccacgagaggcccgtcatgggcgctggcgagttcttctttgtcgaggccgaaggcgacattggtgcaggagatgacggcgaggttgagattgagggcgaggaggagggtatcggcttcgtctgtggccgagatcaacaacgccaggggagaggtggtcagcgacgcgtccgccggtgccaagagatggcgcaggcataaggtgaccggcctcgcagctgccttccaggaccgatgcgtagtgtgcaatcgtgcctctacccggcacgcctgccagtccgacagaatgagcagaggaaggacgtacgtgcgcgaggcaggcgacctcgccgaggcggccatcgcggaccttgtagacccgcagcgcgtcgccggttgtaccgaggacgtcgcgaccctctcgtgcgccagttgggtcccaggcgatgctcgtgaccggataggggacgttgacgcttgcaagcaagctgagccgcgtcggcgaggccgaagaagacggcggtgccgagggcgtcgagaggagggccaacgagttgggcgtgtgcgggtcgagcgagaacgagccgagggcgatggccgtgtcggtcggcgagacggcgagcgagtagaaggatgacgacggcgacgcgtacgaggtcacagctgggaaggccatggccgcagtgtcgagagcaagggaggcaggcgtcggctaggtgtcctggacagagatggatccggtcgacgttacgcaggaggaggcaagagcgacaggcctgacccctcaacgtcctctcgcccaacgtccatctcattcttcctggccatgtcaacccctgcagcttccgcaagctcagcatcgacagcagcagtcccttcagcacccctcgcaacgaaaagcacggcagcagcgtcgcagatagccctggccccggcggccaaggcgacggctatcggtcctccagcagccgcacagcgcccgaagcccttgacgcaggtgagtgagacgcagctcctatcagcgctcttgagaccgggcattgctcgctgatcatgacgctggtaaaggtctgcctcttttgaggtcggccccctgccctctcgaaccattcgtgactgactaactgaccttgccttccgctctgctcgctcaccatcgaacgatgccgtctgatccaaaggctgaactcgagaaacagaggaaggctgaggccctggccaggtacgacgcgtcgcggtctctttcttggcgtcaactatcaagcttgctgattaacctctgcctgttgcacgtctctgctctctgtcgtccacttccgtcgatgctgcgccccacccggatccgacctccttctcggccgagcaggaagaaggcgctcgatgcccgcttcaagaaccggtcaaagcgcaagtcggatgcggtcgagggcgagggcgccgagagtggtgccggcaggaagaagcagaaggagctaagtgagtcctgcttcggaatgtcgcgcgcggcttcgggacacggcatcccggctgttgagatcctcagtcgacgcagcagacacgcgctgacgggatcctttgcgtgactggcaggcgcttacgagaaggaggtcgccgagatcaacaaacgcgttggcctctcggatacgggcgccggcgtccgtccggtgactaagtgaagcgtcggcccctcgcccatccaccatctgcctcgggaatgcctctagggtccctgcttaccgcgtgaggagatatcacacaggctcgagacactttgtttccagcagcctctgagcctcgccgccagcaagacgtcttcgctcgaggcccctagctcttcgaagccttttgccctccgtctttccctttggtgccgccaaggcagcttgcggctcgctttgacccctctagatgacttcggatacgctaccatccacgccatccgcccggggccgaagagacgttcttttttttcttaggaagcggtatggaaggacgcagtcggaatccttgacgaccgacctcttgccatcaatccaacctttaggcccggttgagcctttctcagaggctacgttggccgtgaccttcctacttccggctcgcttggccaagagaaagtgcaaatgaatacaggtgccgggtccaggatggaagaaagcgggggtcattatggggacaggagagagtcggtcaaggctatggctacgcggcaggcggttgcagagtgaaccgcctagaggagagcgagaattcgtgaagagcggccgagcgagcgaagaggtcgtctacggcgggaaaaggcgtctagagtgaaacagaaaggaggcagacggcgccatctaccagttgagcttctcggggaagtacttgctgatgagcttttggtagtacggcttgagctcgtccttcttaggcggcgcgtccgactttgagtagaggtcgtacgggttgaacgagaggacgtctttgagcgcctgcttgtcggcctcgcacatgaagtgcttgtacgcgccctcgcggtgccacgggtagaacgagtggtagcggatcatgttgagcgccgcctgcgggagcgacgattggcgcttgaagacgaggtactgtaggtcaaggacgacggaaagcaaggtcagcgggacaagagtgcgtgagatgccagacggagacgctacgcacgaggtactcgtcgtggccccacgagagcatcagctgctcgagcccgcatccctccttgtaaatgccgcacttggtgttgtagcgcgggtcgtcccggtccgggttaccggaaaacgagcccgggaagacgatcttgtcctcggggaaggcggcgccgacgacaaacgtgtcgccgacgacgtcccactggccctcggagccaaagaagtagaggagcttgccgaggtcgtggacgaggccggtgacctgcatccagtcgggcttgccgtctttgcgcatggcctcggccgtctggagcaggtgggtgatctgcgaggcctcggtgtccgggtccgactcgtcgacgagcgtgtcgaggagctccattgcttcccagacgctcattgtcgcccgcggcttggcaaaggcgtcggcccgggccttgaggttgtactcgaccgtctgcttcgtgtgctgctcactgaaaatgacagaggagggcagagcgtcaggacgagcgcctcgaggccaagacgatggagacagacgcacgtgtagaacttgaaaggtccagagttctcctcgtactggcggaaggactccttctccttgttggcgtcaaactgcgaggcggcgtaagcgtcggccggagactcgtcctgggcgacgagctctgggtgtgcggccttgaacttctggacgttgagctcgtcgacggcgtccgagatggcgtcgagccgctggccgttcgggtcgtcagagcggacgaagtgctgctgctgaacggcgagcatcttgggcgagagcgaatgggatgggtcgagaaggcgggttacgacgggaggtaggaagtgagggctggaaggatgagtgggcaagggtcgaggtgagggtcaggtggacgaggtggtggacgagagagtgaagagcaaatctctgtcgctccaaggtcagcactgaaaagccttccctccccctccccctccgccataaggtcagtgcaggtcgcggacgacccggattgcggacaagggcacgaaggcgaacggcgacaggcggacgggtccgcgccggcgttttcgcgggaaccgcgcgcgcctgacggagtttcgatcgcctcacctccgtttcttccctccgatgaccagcaccggcggcagtcgtgctgagaggcaggctaccagagagagcaagaaccgaaagaagactcgaatgatagccgaaagggagagcgtgcgtgcccaaccgaggaccgtgttagcgagtcgggttcagggggtcgagcggcgagtagtccctttaagagtcgacggcatcaggagcgaggccccaacctcttccccaccttcttcccctcactcgacggacactcccaagaaggcagacccggcccgctctccccgagcacctctctcctcgtctcccatcaacgccaacaccatctcgcctcaactcgtccgtcctacgccgcccgccatgagctcgccgcacagcagcaaggaggagctgccctcggcttcgacctacaccaagcccgttccttcgggctcgggctcaaccgctaaggttgctccctcacgcgaccagatgccctccttcgaggcctttggcatcacgcccgccgagggcgtctttgagatggccagcgacggcgatgcgctctctgccgcttacggccgcgcctgtgagtcctgtcatcgatgctccgctagctgcgctcacatgctgaccgggctctctccgcctactcggcctcctccaaagccatccgggccgttctcgacaacggcatcgtaatcggctcagccatcgctgcgtgtattggaggcctactcttcggcttcgaccaaggacttgtttcgatcacgctcgtacgtcattgcacgtcggtcaaggagtgtaggcgaccgctgaccatgcgctcgctcatcaggtcatgccgcagttcctctccgtcattcctgaggtcgacgcctcggtcacgtccaacgccggcttcatgaagggtctcttaacggccatgctcgagctcggcgccctgctcggcgccctccaggccggcttcatcgccgaccgcatctcgcgcaagtacacgctcgccatcggcatcgcctggtttatcgtcggcagcaccatccagacggcatgcatgtcgtacgcgatgctcgtcgtcggtcgcacaattggcggcatcggcgtcggtgtcctgtcgacgacggccccgagtgattacattctcagtcttctctctgtggtcttgtccaaagctaacaaaagcacatctggtcttctcaacgcagcttacattgcagagatcgcgccccctcatctgcgaggagcgcttctcgtcgccgaggaggtcgctatcgtcgtcggcattgtcgtgagtcgaaagtgccgctctcttgagatatctcgttcttgcactcacatctttgttcctctggcatctctgctcgccgaaggtgatgttcttcatcacgtatgggactagattcatcgagtcggaagcttcattccgggtgccgtttgccgtccagatggccccgtcgtttgtgctcatcggcctcctcttcttcatgcccttcacccctcgctgtaagtcgctgcccccactctctcgttgaccccactccaactgacacatggcctctcgccactctttgacagggctcgcacagcagggtcgcgatgccgacgttctctcgactctttctcggatccgaaagctgccgacgagcgacgtccgcgtccaggccgagtggctccagattcgcgctgagggtacgtcatgcgtctgcatctgctccaacgctctgctaaaatccaactcctgtcactctagcttgcttttgccgtgaagtcgtcctcgaaaaacatccccacctgcagggcaccgacttctggtcagcgctcaagctcgagatggctgcctgggccgactgtttccggggcggcgccgctcgccggacctggatcgggatcaatattatggccctgcagcagtttacaggaatcaacggtttgtggttttctctttgcagtcaatcgagcggcatgttgctgacgtcgactttgaaccgccccccgctctcccctttccaacagccattgtttactactcgccgtccctcttcgccgcgctcggctacgccttcgagcagcagctcgtcttctcgggcattactaacggtgcgtgttgaaggcgggtcgtggtgccgtttcaagaggtagctgatgcgtcgcgttgccctttttttgcttccgcgcagtgatgtgcgtctcatcgctcgccccgcggctgaacctcctaagacgctgacacctcccttcttctcatccacatcacttcaggcaactcgtcgctgtctgctctgccctctggtcgctcgacaaggtcggccgcaagccgccgctgctcgtcggagccctcggcatggccgcctgccacgccatcagcgctgccatgattggagtctacgcggatgactggccagctcacccgacgcaagctcgtgttggagttgccatgttgatggtcttcatgctcttcttcgtttgttcttcttccttgcatgcttgattcttgtcgagacactgaccgaccctcattctcctctcgcagggcatcggctgggggcccgtcccttggggtctcccatccgaagttcactcggtaggtcctgtcatgccttcgctgctgcactcagctgacaatatttgccgttttccctagacctcgactcgtgccaagggcgtcgcgctgtccgtcgcttctaactggttcttcaacttcgtcatcggcctcatcacgcctccgctcatcgaggcctctgcgtgggggacgtttgtggtcagtacttgccgtctgcttggtcgggatttgtaactgtcgctgactgtggccgcccgtcccgcactctcacgctgcaacacagttcttctccggcttctgcgtcatcgcctttttctggacctggttcctttgccccgagaccaagaacaagagcctcgaaggtacgcactcgctctgcgcaatgatgacattccgagcgtatgctgaccttgtcgacgcactgcagacatggaccgcgtcttccacacgaacatcgccgtccgcgacgcgcgagagaaggcgctcatcctcggcaggctcaccggccgggacacaagcgacatcctcgccaatcgcttcgataacaagctggccaacaagggtaccgagcgccgcttcgagttcgtgtgagcggttctgccgcgctggcacgcgcctggcactcgctcgccgtttcacccgacgcagggctccccttcctccgccagcttgaggctctcccaagctctgcaccgccacctccccccacttctcaccctggcccgccccgttgtactatctagacctctcactcattcttgagcctgttgccctctcccgctcctcctcgaactgtatcgaccgcctgcgctttgcatcatggcttttttggtgatctctcgattccctgtctgtcgtagacaggttgcagtacaacaagaatcttgggtcgataacagggtgaacaaggcgacgcgaaatcagggaaagattggcgagcgaaagggtacgggagtcggacggaggagaggggcgaagggcgaccgcgagcgcctcagcagggcgtcggctctatgtcagaggcgtgattcggaacgatcgtgcgagagactccgaccgtcttccttgagcctagatcacgcggaactgcaagcgatattgacggtcagctgccctcctgggcttgggttgtcaagctcgtccgccacgcagcagcggcagctctgccgggcatacgcaccatgttgtcttttacgttccgggcgagaccattccactcgccctctccaacgctgagacctccgccgtcacgctcgagaagtctctccttaatcagcgcgtcctgctcggcgtaggtgagcttgcgggcggccggcgccggtagtggcggcgaggggtcggccgctgctgcttctacttctgctgctgttgaagcaagggctgtcgctgctgctgcgacggccgctgaatctggctgcactgctggctctgctctagtctcggccaaagatgccggcggatgtgttgatgttgaggtcgacggtcgggtggaggacgaggccgcgaggtcgactggcgcgctgccgacggtgtgcagcgaccggcggcggccggcgagcgccaggagcgcacgcgtctggatgagagcgtatgctcggggcggtagtgagagagcgtaacaggactgcatgctggagagattggaagaggatggtggttgagagcgaggcaaggccggttgccactctcgctccaacagctgggcgtgctgctgcgcgacctgacgtcgcttgcagcgggtgctcttcccggccatgcgtctttcaaaacaagaggtccatcacattaagtagtggtgaggatggctgaggcaagaggacaagtccggtacaccaagaaagaagagagcaaagacgcggctgggggtgggtcgtgagtgggggtgtacaacagagagggcagaaaagacgtcgtgcagcctcggccaacgtcgctacttgtcgacgacgctgccggcaccgccgacactactgccagaggaccctcggcggcagtcctggtcgtaagcccgcccgcccccgacgacggccggctcgtcccgcccaccagggaccgggcgagttgcttgagcggtcgaagcgatcgatgcgctcgacggcgaggagagagacagggaacgggtgggcgagctgccgtcggtcgtcgagctcgagcgcgagagggtcgagctggacgagagggagacggaccgggcggggacgaggtcgggcaggggcggaggacaccgggatgacggcgaccggcacttctcgtcgtcgtcgtccgagctgtcgcccgccgccgcggaaagagggccagcgggacgtatcggcagcgactcggacagcggaagtcggcggtcacgggtcgttgtcgtcgggctaaccggaggcgaagggcgtgaccgcgaccgcgaagggacggctggctctgaccgaccacccgctgccgctgccgacgaggtcgactttgaccgtccgtgcttcccgttcttggccgatctcgcactcgacaccgtcggctgagactgcgagacaccgcccgtctcgccctttggccgcctcttctcgcgcatcgacggcagcgctgaggacgtcggtgcactcaccgtgctcgggaggagttcggcatcgcgtcggcgctggcggcggatgtgttcgcggaacatgaaggcaagagcgaggaccatgacgagcgagaggaggccggcgacaaggccgatcgtcattggactgacgttgtgcctgccggaaggcgcaggggtgaagagatgagggtcagactctggtcgataagtgggacaaaagggtcaagaagggagagacgtacgacggcttgtcggcctcctcatcccggtaaggcgtcgtgtccgacccttcagacgactggcgatgagcgagctggatgagcgccgctggtagccggcgacgaggcgtgacagtctcgagggcgggcatgtttcgtgaagcttccagcgacggaaccctcaaggaggaggttgagtttgagagaaagcggggttgagggatcggccgttagatacggtggtagtgagaggatgatgaggcggtcgttcctacagacagtcaagagagggaagaaggtgagccgcagagtcagctttgacagctcgtcgataggcggtgttaagggtcggaaggcggaaggcagaggcaggccaaggcgacgcggcagccgtcgacggcggcgtgcgcgcatgtgagcttagtttctgcgcacgcgcgagacgaccggatccaagcctccgacccttcggcttcgaggcaagactcgccgagagacggcaagccgaccttccgcgactctctgcaagctcatcgtgtagccacggacagagacgagaggctcgaccggaggtggttgacgaacgcttggcgtcccactcgcagtctcccgcacgcgcgcgagcgcgctcggaccccgtcatcctgctgccgcggaaggaggtggcgagagacagtcgattaggactgaccttgggcgaacgaggctgggagctggaggtcgactgaagctgaggcagcccgtgctccttgccctgtgagcgagcaggtgcggtctgggtggaaggcgagccgagccaacggaaggggcggtgcgctgggccgagcgcttgggtcgggggggaagagcggaggcgcagcagcaaaggaggctggcgtaaggtggtgcgcgaagagtggcaagaagcgcaggaggaggcaggccagaggagacaggcaggtcaggtggtcgtcgaggtcgaacctttgccttggggcctccgagctgaaccgttcgagcggtgcgtctggcggcagcagagcgggccaagagatcacttggcagcaggaggcgttcggacgcaagcttgccgcagcccgacagagctagctcctctcttcgagaccgtcagccaggttgacgtcggacgggcagcgacggtggtgctcgaaggcagctgagcgagcgacctgctcttgcctgccatgctggatgctgtcgagacgagattgcgaggtgcagaagagtcgtcgaggttgctcctcgggctgcacggcctcgccctcagctcgcaaatgcaagtcgactcgtcgcccggccgacgcgccgccgaagcgcgacctgtcgacgacgacacctcctcagtccacacatccatccctcgcaaccgccttccttcctcactctcacctgacagcaggctccagaaatggccggtcctcctaaagcgcctgaaccacccgcctctggcgccggtgccgcatcggccgacgacaagtttgcctggcggcaggtctaccacaagcccgacattgccggcatgtcggccctgtcgcggcgcgaggaggaggcgctcgtcaaggacgcaaaggccaacgcgaggcacgtctgcagggactttgttgctggtgcgttctatgtcggccttgcgcagattcgccgctcagtggccttgcgggagggcgagctcgatccagccgcagctcggcggctctcgcacacgtcgatctgacctctcccaatgtcctcctctccgacagcttacgccgcatgcgtcgagccgcggctcatcagcgctctctgggcctgcagtgccaagcaggaggagatgaacgcgtgccttcgtccgctgtgcgtcgccccgcctcgctctgcgtccgccgctgcggctcgcgctctcggcacgacgattgactcgctaacctgcgctttatgcacctgcggatgaacaggatgactgagcaagtcctcgaccgcatgcggatggagtacctctcagagaagcaccgcgaggactaccgccagggtccgggcgaggcgcgcgacggcagccgctcgccctactctggccgctagatcggcaccgagtggtgaccgaacgtccgttgctccggcttcaatagttttcggcggaggcatgccgacaagctggcagagagggccattcggagatggcgcccgtgctgggcgtgcgaccaatgtgcacatggcgccaccgttttgtcagcctcgatccgcctgccctccaacggcctggccaagggcgtctgcaggatggaacacggcccatcgtcggctgttgattggccgcgtcttcatgtgccgcgctggtccctcacgcgcagccgacggaccaccctcatccgttgtcatctgtgccacggtcctccgccgttccgatcagatgcttcggcttgccccacctttcctctccgaccatgctcccaacccgggcgccagtactcagggcgcagcttatacgggtgagacagcttccagagttcagcgcgagcgctgcaacgctcgccagaaatcatgagaagctcgacatagggacggaagtgggaaaggtcgaggagcagagtaaggcagcgtctaagagatctggcggggcggggggcccccgcaggcgtctcccaccctatcccggttgattccccccgaaccgcctgattgacccctcggttagccggcagattcacaatcgggcgccgtcgtctgatttcagtgaacaaggtgtgagctcgaacgacaagatcttgctcacactttggaaatacctggctggaacccctttacctggatagttgtcgctttccgcgacaaaaggctcgcccagtcggggtctcggaagcggcagaggctcgtacagccccgaatgtgtaggtcgtcctccgtcgctcagtgttgccgcagatctgcccatcgagcgggcgcgggttggaggtggccgctcggtccgtgcgttgtggggacgcttcgcgagaagtcgagcgagcggtcgcctggagcaagcgcgacgaagcatcttatcgtcagctcaggatgcgctgctagcacgaaggcaggccatgtcgctagcgacacaagagggggccgtgtcgaccttggacagctgccggcccggctggagtgcgccgcaagaagggacgaacgtcagctgcgagagcaggtaaagtgctgcaggccaaatgagacgaaccgagcgtggcctgtcgtcttctccgccaaatgccgcaaggacgtccaagatggactcggaccttttggttatgctatagatcgtccggcggttaccaaccgaagtgaataaggtggccgaggcggctcgactgggacgcacgccgccgaggccgtctgaaggttccgctgaatcgcgacaagcgcatcgtgcagcatcgctctccaccttcggaaggagtcaatgcggtcgtcagcttgcaagcgccatgtcggcggccttgatggccaggcaccatcgctctcgcaaggccggcgggcgaggagacgcaactctctgcctcccgctcaatcgccagctgcttcgcttgactgccggagaacctcgatcgccagcgctcggccgaagccttttttttgttctcaatctcgtactattgccgggtgacgagctgcctgtgttagcaggaaggaagagggaagggacggctcgtgtgctcgggttgcgcagcaagagatgcaggtgaagggacggacttgagctcgtcgagctcagcctcttcgtcgatcatgctggatggacgatctgccagtcgtcggtcgtccggaaggcacttggggctctacatgagatgggacaggtcttgaagggggtctggtgggtgggctgtcgagggacgctcactgcctctcttccagacgacggcagctcgacccgaccttgcgcccaacgtcgacccgcccttaaagcttcttgctcctcttacccctcctcccgaagccatcttacccagctcggctggtcaacctctcctccatcgctgcccagcttctcttagtgccagccgattcccccctcttgccagcatggccgccccgctcccggccagccggatctcgtccctgacgagctcgaccctgccgctcatccttgagcgccagcggtcactctcgctcaacctctcgccctcacccttcaccgagtcgacgatcctcaaaaacctcgcccttctgacggccggcgtacgcgtcctcgagctcgagggaaagggcgtgcgtgttggctcgggcgagcaggtcggccgcgaggacgccaaccggctgagggagggcgtcgagaaactccttgcgctcatggagggcgacgacgagggccggcagaaggttgtcgccattcgggaaagcttccagtgcgcccttccgctctcgtctgatgggtccgagctctcaggctgaccagcagctcttctggcccgcagtccgcctcgctcgccttcacccccgcctccggaaccgctctttgcgctcgcctcgccctcccacccattgatcggcctcccgcgagagtcttcgccgccctcagaatccgatcctctctcgcgtccggctccgggcggcctccacgagtcgtaccgtgacgacgaggaggacgagccctaccgggacgtcagcgacgccgacatgctccagcagcagcagcagatgatggagggtgcggctgtcgtccaactcacaggtgcttctctgcgtcatactcacggcttgcgcttgcccatctgcccacctatagagcaagactcgcggctccagaacctctcgtcatcaattgcccggcagcaccacctctcgctccagatcggcgacgagctcgacgtccatcacgagctgctcgaggacactgaccggcaggttgaccggacgtccgagcgcctgcgtggggctcggcggcggctcgactcattttcgcacaaggcgaaggagaacggtgcgtttctcctgtactgccttgcttgcacggctgctgactttctcccttctgccggcagggagcgccgtcacgatcgtcgtcctcatcatcctgctcgcgatcctcatccttgtcttcaagacgtagagccgtccttgccctcgcacctccccgtttctgcgccccactcggcgcctgtaccacggctctgttgtaagatgacgccccttgacgtcgctgagccgcgttggctgctggccatgctatctgcgcacggaatgaatagacgacatcgcggttgagaatgttagaaaggttacagaagctgaaaggagcagaaaacagaagaacaggagggagacgacggagcgcatgcaaacgggaggcggagggtgccggcctgccgagagcacgagaggaccaggtcagcgtccaggtcgacagcgagccaaggacaaagccatcaacgcgacgcacttcaggccttgtctagcgtctgaggccccttccattgccgttcacggatggtccgttcgagcttggtctcggcgcgctttcgccgttttgctgggcacagctgccctgccgcgttgaactcggccgccattgccgggcaacgcaggccgaagaggttgcggaattcgtctggtgtgccgtcgcggtgtctgtagtagcactttgccgtgcctgctgattgaccgttgtcggagcgaacaggattgtaggtgcatcgggtccactcgtcgggcacaaatgtgcagagctgggtcgcttcgtcgcaaacgtcagggaccatgttggtctctccgttacgcacgtcgggggcggttgccgtgatgggatacttcgccaggaaatcaggacctggagcaagacacaggaacgcggtcagtcgagccgcagcttatcaaggcgagtagcgcgcgcgcccagcaacgcacaaacgaagtagcagcccgcgcgggaggcgccgggggagacctcgaaccgtttgacatactcgacactagtcgggccttggatgaggccggcagacgtaggccgagctgccgagaggagaaggaggcctgcgaaagcggctcggctgaggaggttgagcatactgctgggcggccggaaaggcgacgcgggtgcgagagggcgtcggctgcgagagctggtttcgagagaaagcgcgaggtggacgttcgatgccaaagcagggggcgggcgttgaaggtcagcgagcaaacgggttcgcaaaagggcaggagggctggctgtcagcagcgccacgcgggggaacatgggggacaagcgaacaagaggtcgagcgagcgagcaagaggaggaggcgcgcagcgcgcgcagtattggccgcccgcccaagcagatcgctcgaggcctctgctgccgctgcttctgcaaagcctgatgagcttgcgcacgcctgctggggaacgacgcccgctactgctgaagagcctcctggcacttttactgcagaatatctgacgtaggttgacctgccaagggcaggccggtcacgacgctcgtcgcgctgcaagagctgcctgtgcgcctggcccgactacagtgacggcgtgcagcggctcggctggagacggcgggcgatctgggcgaggtcgccctggcaagatcgtcttgcccttcgtcgatcagcttggccagactggtcagcagcgaggtcatcgtcgaatggataagagcggccgcctccgcctgctcggctttcagctcgacgccagacttcgcccctgcgaccacatctcgccctcctgcactcgctcgtccgtcccaccggctcaaccttttggcggtcacgaacagacacggctcggcagggcaacatccctgtcgatctttcagcagcgactatcgaaccctcctgcctcgcggcagctcagccttaagggaaaggcgcgagcagggccgcccctcgtttcgcccctcccgtcatccagcgacaaggccggctgctgacagtcatgcaacaatgtttccaggtgtgactcgactggctggctgcttgttctcaaagcgagaacagcgggttgacggctgacctacgtccttctctcgcgtgctcctcgcgcttgcccgaaggaccgcagcagcagcgatcgattaacggcccgtcagagtcaggctgcctccgacaatctccagcgtctcgcccatccagccacgtcgctcgcgaacggccttcggaccttccttgtcaaatgttcgcattgtgtgcagtgtcctgctcctcgatttgccgttcttgcggtcgccgccgatcgccgtcacgtgcggccaggctgaccactggctgacgaataccaaggcctctcgctcgactgccagtttgactgaccaagcaaggcttcggctgttgaagccatgtctcctgcgttgtacacgcgtccggcggcgaaatagtgagcgctctagcgtctctccgctctctgccgtccctagcccttccaaaggtatcgttgctcgatcggcaggcaggcaggctctattgatagatgaccttcagcattgactcggatcggagataggcaacggcagggtgggggcggaggaacagagttcagaaggagagggcagaaggagaagggttaaaggagggaagcaaaacgagcagggtcccgggaaggaaaaagaagagagagagggaagacgaagattgcaggcgacctgcaaggcacttgagggaggaagggggaatgatcagcgtgtgatcgtgtagcagggaacagtccagccgaagagacacaccttaggccttcttctgcttgcgcgggcccttccactggcgctcgcggacgacccgctcaagcttggtttcggctcgcttcctggtcggcggctggcagaacgcttttgcggggaggcaggcgttgatgttgccaggtgccgaagctccggtcgcggtgtacttgcaggtaatctgttgggcaagggtcagtacgccgtcgtcttgaagctagtggtcgtgggtgtgctcacagcgttcattccgttgccgtattggcaggcggtgattccgctagtctcggtggtacccttcagagtcgccggcgtgttcctgctcggggtgttcgtctgcaaagtggggcctgagttgatcgagcgcgttcagtcagcgctccctagtgatctgaacaaacaggtgaactcacactcgtagtagcagttcgctcccggcaggccgggagaagccgcaaaacgcctggcgtactcgacgccggtcgggccctggatgatagcggccgacgtgagctgcggggtgacgaggaggaggaatccgaagaggcccgtcgtgaaggagaggggaagcatggcagcagaggctgcggtgagacgagtggggaagggggtgagaggcgatgagatgcgctcctgagaaagaagacgaaagcgctggaccccctttaagggctccagtggtccttcccagtcgagagcattgctcccggacaggcgagccagcagcaaacatggctcgccccccttgtgtgcgagattgcttgatcctcagacatggtccggctgcccaagcagatgagcaaaggctgtccggcgctcaggcgaacgcccgagtagggtcgttgaggggtacgttggggttgacgacgttctggccgcagctggccggcgcccgtcagccaatcgctccccggccaacgacagggcgccggccccaaaagtcctggcgacgcctcgttctccacgccaacgaagtcgacgccaccgctttccacggaaggacgttagcactctaggcctcgttagcctggaaatgcgagcaagagcctgcggcggaggcgcgttggtcgctgcgccgagctctgtgtcgacgggccaagcacggggagcccggcttcaaaaacgccagaacgccactcccggtgtctcggagacgagaacgccactgctcggagagttctgggctccggtcagccgggccgatgcctgaataggaaagtcagcgggcggcgtcccgcgcagtgggaccgtttgggcagaggcgcagagcagcgcggcgccagagcttggtgatggagagcattaggggtggcaggaagagccctgtaagcccaaccctacgccctgcggccggccggcgacgacgagggcaaacgactcgagaagcaagcgaagtgtgtgcaacgcgacctcccttcgcgagcggaaggaaagagcatgtgaccttgaaatgccaccctcgatcgccggacagagaatcaggcgacctcccggcgctcggcctcaggccggcttgtggcgtgaaacgcacgactaaccgtgctcgacgacgacggccggcaacgcgtcccagaagtcgcggcactggcgacaccagcagtcgccatctccgtcgacgaggagcttctcaactgacgacaaaaagagcgcgcccgtcaggcccaagcgccgctcgaagagggtagtgagccgaccagacaagacgcacctcggccgttgaagcgcacggccttgccctcgaggtccggtcctttcaccgaggctgtgggcagcgccgtcttccggcatacggaggcgttcagacgcttgcccggccgcaccgtcgtcgggacctgcctcttcgcaggcgagacggacgaggtcgacgccgccgcgaccgctgacgacgacttggccggaacagacgactctgcctcgagtcgcttcttaacgaggcttccgcctctgatgccgaccgccttgaccttccggagacgcggcgccgtcggatctttcttgaccttcgagttggccttctcaaccttgacggttgtcggcggccggccagccttcttgcgctttgtaggccgcgccgtcgtcttaatgatcttctggtagttgttgtccgacttggaggccgacgagtcgtcgctggccgagggctcggcaaacgatgcgtcagacggaacggggtcttcaagtgggccggtcaggcacagagcaaagtgcgcgcgcatcttgtgggccgacggcgtgctgaagatcgtgcacgacttgcaggcaaacacgccgtcctgcaagcagtcaggaggcgcgcatacaggtcagtcaagagtaagccgagtcatggcgtgtccgccgtttgaggacgtactactcggcgcctgatcgtctcgtctgccggccagagtcggatgagcttgcgtcagcctctgctcgcccgcgagtcgcaaagcagccgagcactcacacctgccctcgagcgtcatgaccgagaccttgtcgcctccacgggcggaggcctcgcgtgttgtcgggatggccggcgcctgcggcttgcttgaccttgggcttcgcccgaaccttcggcagcttgggcggcggcggcggcggaggcgcatgtggcgcctcgaccaccatactcgacgttgctgagacgctcgatcgctcctcgaacggcacggcggcgagccgagccttgccccttgccgacaggggtgcgccctgagacgacgttcggacctgctgcgcgttcgccggcgacgaggctcgttcggctggcctcgagggcgagggcgaaggcgagcggtcgcgcagaggcaagcgctcgccgccgtcggccgagccgtcgtcgggccgagcgaagaagaggcggtcagccggctgcgagctgggcggtgagggtgggagggggttgtcgtctagcccgatgcccaggggcgagaggggctcgacaacaacgccgtcgcgcgccgagccggtgagtgagccggtggccgaagcggctggcgtcatatcgaggcggacaagcggtatgcttttgaaaagctgagagatggacagattgtcaggtctgctgctcagaggtcgaggccggaagggcagggttagcaaccgcgggccttccttgcatgcgaggtcgctggccatctcgttcgtgtacaaggaagacgcacctgagggctgtcgatagagccgttggcgagcggagacagccgaagacggtctggcaactgtcttgtgacagcattcgaggtgctggtctccggacggcaggctctagtcgggtcgagcgcgtcgaccacgcggccggggcttgctgcgcggcggcgacgacgggagtgcccgcctgaagggccttctgcctcagcctgcttgcctgccaatcgtcttaacgtccatcaagatcattctcagcgctgtaacgcgtagaggtggctgcagcggaggagcctcgactcgaagccgtgacgcgtggcgcaaaggccggccatgctgggcgttggccaacccggcgaaaacgcagtgcgggcagcaaacgcgacggtccgccagtcgatccgcatgctggcttcaatagccgcctgatagaatagaatgtctgcgagaggcccgacttggccttcaatgctatggcaagatcggaacgccggtcagcgattgatggcgagcgaaagcaagtacgatccggactgaccgagctttgagagcgaagcgctcagccagtcccttgggccaaaggttcctgcgcgttcttgccatcgtcggcctcgagcttgcgtcgccactgccgagcccggccgtcgcggccaaacgcctcctggcactcgacgagaagcccgacgacctcgcgccaggccgcccgctcagcctcgccagcccagaccccagcgggcttgcccttccgcgcctccttctcggccgtcccgagctcgctctctgcctcttgcagccggacctgagcgaggagctcgcgggcgagcgcaagccgcgcttgatgcaacgtcgggagcgggagcgcgtttaaccggccagcagaggtggcggcggccgacggcggttgggcgagcagatggacgagcgccgacaggagcgggatcgagtgcggctcctcgacgagcagcggcaggacggtatgcagcgtgaggaagggcgaaatggcgctcgacatctagtgcggctgggagcggagcgccgtgcgagacgggtcagcgggcggggacgcgcagacgagcgcggcgagagcaccggacgcacctcgagcgaggaattcttcaggtcagcaggtggtcgaccgtgatcagcagcgcgatttccctgctgtcagtcccgagctggtcttgaagaagcgtcttgaagaagcgtcttgaagaagcgtcttgaagaagcgtccagggacagatggccgccggacggacaagaaaggcaacgggccgagcgaacctcttcaacccccgaccacatcctgtgacagcaacgcccttttcctccgtctgcctcaagaaggtcccagcgacgtacggcgacgatggcagactctcccgacggcatcgaggtgcgtttgctctgcgcgctggtatcgtcgagggaggaaggggagggcaagagactgaccgctttccgctgcacgccccgcccgcatctcgctcggcccttgtcctgccccgccgctgttcctcgctaccaacccgccagtccttcgccgctcacttggccgacatgtcgcgcgacaagcgcgtgtcggcgaccaagatggaccggctgaaggagctcggcatggccctcgtcgaggtaagctctctcggccgtcgcgggcaggcttttccttggctggcggggctcgcacaaggcagtggaaccggccgccacgctcggaccgatgataaggccacctctagccgtccgtctggagctgtcaggctcgctagcaagctctgcgtccaggccagtctgccgctcaagggacgccgagggctacatgcgtgcccgccccagccccgctgggcctacccgcctacccttcgccgtcgctgaactgaagcccgcgctgaccggcagtctctgtctcaccacagcacgatctcgagctcattcaggcgattctcaagctccttcaagagcagcgcccgtccgccttcggcaaaatcatcgtcctctatgcgtttgacgcgctcgcccagctctgcgcgcgccgcgtccgcaaggacccaaaaggccgcgaggcggccgccgcagccgaggtcggcaagggaagcccgcagagctttcttcagtacctcgacggcgcgctcgacgaggttgtcgggagctttgttgagaatggcggcgtcttctgggcggatggcctggtgagtccctcttctctacgtcgcccgccgagggccatcccttctcccctgtacgcccttgtcttcgtcgaggcttcggcgacccaggccgtggcgacacgatcgtgcgaatcgcggttgccagccgagcagcgcgtcgcccccactacgacaaccttttcgctcaacctcggcccgctcgcgcccccgttttctaccgtactgcgtatactcatggcgcctttctcctctccgctccttcctttaaccataggcaaaggccaagaaggtgctcgacatttggctcgcgagcggcatctgcaccggcccgaccgtcacgcgcaacatccaacgggtcgacaacgcacttgccaacccgccggcggtaccggctccgacagcggcggccgagtcgagctcgtcatcgaggacaaagtcagaaggtacatcctcgccttgctttgctgctgatcgctttgacgctcgcggtgtcgcttgctggtcggcgcgtgggaagtcattctcgttcttggcctcgctccgcctcctcctcctcccttatttgctgctcgtggccgactcgatccgcgttcctcatcgcgggtgcgcatgtacctacgatgtagacgcggcgtgcttctgggcgtcggccggcctcggccgtccctccgatgttccggtcgtcgatgacaggcgtcatcaagctccgagccacgccccgagctcgcctacagctccctttgccccgccgacaactaccgctcgacaactcgccgaacagggaaaccgagcgaggcaaacgtgcccctcctctattcatggcctcatccatcgcctcccccctttgcgcacggccggcccctacttggagcgagacgtgctgagaccatcctctgctgcgcgcccccttccccttctgtcccgtcccgttcatctaccttttctcctccaccaccatcgccgtcacctatcggctcttcagcgaacccgaagggccgtccatcgtcctcggccaagtcgcggagttcacagtcgcatcggtccggattggcctcggcaggcgctagcagcagcggccgcagcagcaagaccgcccgtcggtcgacgacgacgccggttggctcgccaccggcacaccttcgtgcgctcctgtcaagggcgtcgccttctccggaagcatcaggggaggtaccgagtgccgggccgtcgtcgaccccatcagccgcgaccgggacgccgacgctcgacgtcggcagcgtcgccgacagcgaggctggcctcctcggcgttctcgcctcgctacgcaacttggccgctccggctcctgctcccatcaacgtagacgacacccagtcgccccaggtcgccagcctcctccagcagctatcgagctttcagaacccgcctgccaacggcggcggcggctcgccaacaccacccgtgccgcccccgacggcctatgcggcgctctcgcagttccatgcagcaggctcgcactcgcccgcgcctcttgcgccgacgcagccaatacccggcttaggactggcagcgaacggctcgtacggcgctgcctacggtcctgcgatgcacgctgggccgtcgggcttctaccctccgccgatgccggcgccgacactccctaggtttggccagtcgggcccgcaggcctacccagcatatcaggcgtcatacggcgcccagcagcagcagcaacagcagcagccggcgtaccccggctcgacctcgaccggcaatctaccgcaacagcaacagcaacagcaacagcaaggcgcgccgcggcccttcgtccctcccccgcccgtcttggcgaactacggcaacaaccgcggccttcgtccgcaagtcggtgccggcgccggctctcctgctagcggcagcggcggcgtcggacggggcggcttccagagcgccggtgctggaggcggcagaggggggttcggcagcgccggcggcggtgaagcgcgagggggcgggtcgtttgatgacggtggacacggccaagggcatgcgccgtatggcggccacgaacggggcccaggaaaagggccgtcagcctacactcagcaccagcagatgccgttcaacgcccccggagccggagccggagccggaccgacgccaacccctcctcctcctcctctctctcggcaacgtcctccgccagtctctcgtccatcacgcccgccgtcctccggtcgttcggcggacacgcggcacgcgcgagggaacgggcgcacgagcttgttcaggcgggtcgggcgcttcagggccgggtcgacctgcagctcaaagagctcagtcggcagctcgccgccgtctccggctcgacgcccccatcgagcgacggcaacagcgcaccaccgatggccgccgcaccacccccgctcgccccgctcgaaaaccgactcgaatgcgtcaagtcggcccaagcggccctcgtccggcgcgctgacgccgtcctccagcgcgcaatggacggctcgagcccggtcgtcagcgcgcgcgagcgggcgtggtttgccgagcttgaaggactcgagtcggccttgggggcgagtggcgggctgagggagaggttcgagacggtccgttcctctgcacccccctcccctcgggttgtgaggggagtgtgagtgtgtgtgggagtgggatgatggaggaaaggaaagagaatggtcgcctctttggcccccttcttatacccttctcgctcaacctcggtcccatcgtcacagatcgggaccaagagctcgttaccagcagcaagcagcaggacgtcagcaaccgagtggtgcgcgatggtgagccaggcgcgcgatcggtgagactgttggggcggcggaaggacgaccctagctttggacgcgcgacccagccgatcgggcagtgcgggcagagagacagctcggctggagccctctcgcagcctatacgcgtgatggcgggaggggacgcgtccgatggtgggaggttgagggagcgggaggaagagccttccgtcgacctgggcgcgtcaacacgggccgacactgccggcgcgtcggcgcagtcgggagtggtggtggagagaccgcgttccatcggtgagaacgatcgctcaacatcggcgacctcagggtgggaaggcaggagatggacagcagagcagcagcttgaatgagagcagtagtcgagctctcttgcaataaagagagaggaaggcgatggtgcaggtcggcgctcatggtagacggacgaaactctcgcccgtccaagggctgatctcgtcgtccctccgagagggctgaagacgatcgctcttgcaacctcgaccggcaccctcccctcagatctctcacccacctacctcatcgctagcggcatgcccatctcgatcgacttcaccggcaagatcgccctcgtcaccgtcagttgagctcacgcgcgcaggctgtcaatccgccggccaggccgatcgaccgaccaggctctggctgagagtgggttgctgatcttcccttcttgtgtccagggcggcagccgaggtattggactctccatcgtcaagcagctcgccaagggtgcatccaaccagctagctgctagttccttaagcggttaaagctgacctcgcagcatgcgatccaatcacgctcggcttgcccagccggcgccaacgtcgccttcacctactcgtcgacggcggccgatgagctcgcctcgctcctggagtcgcttcggaccgagcacgccgacgtccagatcgaggcgttccgtctcgaggcgagctcgagcgcgagctacaaggcgctcctaccagctatcgaggagtgcccgacgctgacgggttccctcgacatcagtgcgtcttcccctggcgtccatggacgacagtctttgtgccgacatgcccgcccgcctgccttttgatcgccctgcagtcgttgccaacgccggcatttcgctctggttggcggccgagtcgacgtcggacgaggcgatgcagcggctgtttgaggtcaacgcctacgggccctactacctcttccgcgagtgcatgagccgctggggggctgataatgtcaaggacaaggttggcgtcgtcgtcagctcgatcagcggccggatcgttaacgtcccgcagaagtgggtcctactggcaacggcttactcaaatatgttgctgactgtgctcctcccctgcttctcacctctgcgtaatcaggcagtcggcttataatgcgagcaaggcagccacgacggccttcgtccagtcgctcgccgccgagtgggcgcacaccggcttccggatcaattcgatctcgccaggctacatctactctggtgcgctgtcgacctggacagcaacttcctgctctcgcgctgacctactgccgcctttcagacatgatatcgagcgtcgacaaggcctggacggatgactggctccggcggacgcccctcggccggatgggcactactgacgaggtcggcagggccgtcgtcgccctcgcttcgaaccagttcacgtttatgaccggtgcgaccgcgtcctgcgttctctgtcgccttcaatcgtagactgacctcacgcccgcaccatctgctttgtcgcacgcaggatcggacgtcgttatggacggcggtgagtgccctctgcgttgtcgtttggccttcgatgagcccgaattgacgataggcgctggaaatcttcgccaggctatacgctgctttaatgcacgcatcttggacgctctttgcgccggtcgactaatgtatgcttgctctgaggaacttaaactttggccggggcgtgaaaggctggcacgcgccatcgcggtggagggctccctcagtccgtcaggaagtgccgactcaggccactcttccgccttgctctgaaagcgtggtgaaatgacctttatcgccggccgcttaactttcatcgcagcaggacgatggcggcggtcgcttaaacgtctcggcactgctaggcctgctgcgcggcagcatcggccggctccgacgaggcgacaggatggcgacgtcgccgcttgttcgtcaatgctcgccatcgtcgccgtcgaccatgccacctccccttacgaaggaggctgcccgtacaaagcggtcgtggagctgttcaggtcaggcagatgacgctcgcaacccaaccttctcaataaacccctcccgcacgtctctgatgtccatcaagccctccctcagcttccagcggatcggctcatcgtcctccagccatgagctctcggtctacatcgactaccagtgcggcaagtgtgccgtcatcgcaaatgccctcgacgcgcatgtcatcccccgtgcgtccgacagccttaaggtcctctcaacatcgccgctgacctcgcctttgcttctgccgacagacgtccagccgggagcgaagctagacggcaagctgacggtcgtcctccgtctggcccctcagaactggcatatcagtagtgccgccctcgccgaggtagctcttgccgctggccgggctgcaccaggctcgttctggccaatcgcgctcgcgctgctcggccagcaagccgacttcctcaacgtactcgcccaggacaggacgcagcgccagctccggcagcaggcagctgagagtgcgtcctttggggctctgtctcaggggggacaaagaatctgaccttgccctcctgtaaccagtcgtcgccgctgccgttccctcgctcgatgcggccgctctcgtcgaagcaacaaccaacgactttgcgcccggcggcctcggcaacaacgggccctcatccgtcacggccgacctccagtggaacgtcaagcaggcccggcagctcgccgtccagcacacgccaacgctcacgctggacggcatcgtccagggccacaactttgacggcgccgtcgtcaacggcatcgcgtcaagctggggcgcggccgagtgggaggcctggctcgcaaaaaacctctagaataggtcgtcgcgtgcctttcgactgaagccgtgctgttcaaagtcccatccgctgggagctgcaaatctcgtggatctgccgcgtgcgtgcaaaccactgcctgacctgcgtgtacttctcgctgaccccaaccccttcctctctcccacgtagccgatggtcgaagtgcgcagttctccgcgaggtccggaacagtcaggctcgtccgtcctggcttgtagccagggcactgtcggtcgccctctcgttgtcgatgtacgtctctcctccctgctcgcacgcgacaccccggttctgaccctcgacgcccctctctctcgcagctctctcaggactagaccctctcctcgaccttcgcctccccccgtacgacttgctcctcccctcccaaccgagtggtcgcgtgtcctgcctctggtgctcgatccgatgacccgtgactgtacccctgcaagagacccaccctctcgatagcgtgccgtcgtaagccgccctcgtgatgccgtgcagggaagatagacggaggatccaaatagcagtggagattcgaagcgagcgatacaaaaaggggatatgggcggggcaagaggggtatatcaaggggtggttgcaggaggtccagtgcaactagtgcgatcgtgcaggaaggagtcaggaggtgcagaagcgctcgagagatcaggagttcgctggtgtatacgggtcgttcaaggagcggacgaggtgccgagggcggcctccctcttttcggcggcggcagctgcttcggccacgtccccattggcctggccgtagccgcggttccacatgctcggcttcttgctcggatccgtcgccggcttgggcgccttggccggcttgctcgcgctcgagcggaacgatggcaggacggatgaggtcgacttgaagcggtcgctgatgggcgtcgaaaaaatgtgtttcttggctgcaacgatgccggccggcgggaggacgtcctcagccggttgcgtcgagccctggccggtcgacgacggaggcaccgcgagcgaggtcgtactgccaggcgtcgaccgggccgccgtcttgtccgaggtcgacgacgacgaaaaggcggcattggcgaggtcgatgatggaccgctttcgttgccgcagcaagggcggctgctccaacagggttgatgtcgtgctggcctctgtcgtcgtcggaaaggcgacaacgccggcatcccggctggctggctgctgtgtctgctgtgcggctccagcggccttcctgcgtcgggtcgagccggtcggcgacggagggagtggcgcaaaatcctgcacggccggcgagaccggtctcgaaccccagccgtcgtcctgccgagggctggcgcccgtcaccgaaaagtcgggcagcggcgacgggaaggtccgtggcatgtcgagctctggcgcgtcggcgtcggtgacgatgggcgctggcgacttgcgaccgggcgttgcggcagtcggccgaggtggaaggttgggcagcggcgaaggtgatggtgacggggcagcctgctcctttgccggcggcgtgccaaagagctcggagctgtgttcgatgaggagccggagaaaaggcggcgagaggccgatcgtcgggcacaagacgagcaggaggtttgggatgcccatcttgttgacgtgcacgtgccggtcctgcgggagagagggaggatggaggcgtcagcaggcgcaaaaggcacggagcgtagcctaggagacgcaccgtgtgctgaagcaggccgacgaccaccttgagcaacgcccagcacgtcacaggaaggcggccgaggagctccttcatgtcgcgcttgagctgcgcctgacgttcggcgaccgactgagacgacaactcctgggccgtccgatggtgcggccctccgacaaattcgccgccgcgcgccgacgagcccgtgaaacgctccatgacggcgtcaaacgagggttgcagcccagccgtcaggatcgatgacggcactggaagggggcgagtgacgggagggtcagtgtctgacgcggcgaatctcggcgaaggaacgaagggacgcacgctcgcgcaggtaggccttgaagacgctcgcgacggcgtgcggatcgaggtcgcccgcgtccgaaagcttgagatcgatgtcggccccggtgtcgagctgggcgcggagcttgacgactgcgaagcgggcgatgatcagccgagggcgtcgaagagcacagccgagcgactgactgtgcgtgctccggccgctgattcggaagatgccctcctctctcggaccccagatctcgactaaggccaggcgaaggaggagcgagggttagcacggccgagaagatttggggcaagaggagcaacgcacggtactcgacgcagcggacgacgagcgcaggcagcgactcgcggctgacctggtcgatgctgctgcccttgatgctgacctcgtcgacgctgccgctccgcttcatggcggcgccctcgcgcacgccccactggcgagcgacggcgacgacatccttgccaaagacgcggccctcggcgccaggcgcgaccgagccggtcgggctaaacatgatcggcgtcgagccctcgccgtcaattagctcggccctgggcgttccggcggacgacgaggtcgccgacttgcccttccaggccgtgttgaacatcttgacgcccgacgacggcgccgacagaatggcatgctggaagcctcggctagacttgggagcagcggccgctggctgacggggcggcgccgcttgcgacgtgtaggatgtatacgacgctggatctctgccgctcgccaagccgccgccggaggtggtgccggaagcaaggctggcgaggttaccggaagactgggcgcctgcgagattttcctgatagatctgggtcgccgctccgccgaccatgccgccgaacgcggccaggcggcccttgagcccattggacgctatgaaggctcggccgccgctaccgcctccgccgccgctcgagaccgaaggatgggaaggaggcggggcgacgccgccacttttcgatgccgaggtcgacgagggcgtaaactcggcctccgccgactgcttctgaacctcggccgcgggccggggcggcagaagcggtgccgagctgagtcccagcggcgtcgccgaccccgacttgtcgcctttggcaagactggacgacgaggcagaaggtaaaggcgacatcctgcgcgtccgtccgctcgagccgtcgggcttgtgagacgacaaactcaacgcgccctcggccggcgagggacctcgcggcgtccttgacgtgtcggacaacgcttgcgcgctgagattcggggacgagaacgagggcgacgcctgcagccagcgcggcttgtgcggccgtgtcggggtggccgctgctccggacttcgactcaccctcggccggcgtcgtgatgacaggcagcgacgacttggcgcggcggtgcgtctgcgtgccatcagcgctcgccgtctcggccgtatttgcgtgtcgcggcagtgccgtcgcaacccttgctggtggctcgatcgatcggtggtgctgggcgcggcgctctggcgtccttgtgccgctagccccgccagtcgcgtggtagtgatggagatggcggagagaagagccgggcgacagcgggacgttggcggcccaagcgtcgatcgaggcacacaggcttgggctagcggctcgtgacgggtcggtcggcgtcggcgacctctgcgggacagcacggggcgagacagccggcaatggcgagggctgtgagaggtcaggccgctctgcctggccagtaggctgcggcgagacctgcaagagactgctcttgacaccgggccctgctggcaggggcggcgatggtgacggcttcgatcggacgccggccgagccagtctcctctgcgtgcgcaggcatgctcgcactcgcgccaactgaagcagcgcgcgacgttctcccgccgccgccaccgccgctggtcgccgtcagaggcggcgagggcgcgaggaccggtgaaggctcgagggccgacgaccggtcggtgctcgaccggttcgaccgatgggccgacggcgtgacagtcttgaccgtctcggcgagcgagagccggttgatgccagccgctgcggatgcgagatcgaccgtcttccccgagccctcgttctcgagaaactcccagccctgacgaagggtgacgcccgagcgccatccggcggcagcatcgtcggccaaggcgatggccgggtcgtcgtcccagccgtcaccgatggcggctggctcgccgcctccaccgagagcgtgtgcgtcctctgacggcggctcggtcagggacgaggacgagagcgaggtctggagcgatgaggaggatgacgataggtagcccgacgcttgggacgaaagagacatcggccgggcaggtcgcggagctcggctggggcagtggtttgcggaacgacgaggcggttgcgagagggccgacgacggcggactgagcgacgagagcgaagctcagacgctactgctggcttccggcacgcgacttggaaggcggaggaccttagattttgggcgacgcgaagaagggaggagggggcggccgatgggctcgctcgaaggctatctcgtcggcgcgcgttggcgcggtcgctcctcggctcggctgtttgggcctaggtaaggtgcaagacgtggcagtccggagagctgagggaaggattagggcaggcagggaggtagagggaagaggcgggtcaggacctagctgagtagcctgctgtcgagcaggcaggtgggcaggaagcaggaggctgggagggaaggtcccggaggcgacgcgcacctgagaccggcaggcgacgaggggtcgggctaagccgggcttgatccggcagcgaggcgagggcgaggcacaaagacgatgatcctgagagtgtcttgatgtgcctggatcgtgcgatgcagagatcaggttgggcaagggagtcgtcgtgggcgggcgagaggagggaggagggaggacaaggcagcgggcggctgagcgacggccggcacgcttcggaggggcgagcggagccgcggcgcgacgagcgctgcttgcccccagccccgcccgctagcgcgacaagctttcgtagcctcgaccaaaacaagggagggcgcccgcaagagatctgcactgaaccgagatgcgagcctaagaacgtatagccgtcttgatacaacgacaaaggagggcagagcgcgctctcctccgggttctagtgtgcttctctacaagctgtattaaaaaaaagaagggtcgagcgcaggccaggggagacgccgctcccgcattctggtcggcccgcctgggccgcgtcgaggttcgagagagggcgacgcgagagagggcggcctggccgcgacgcgcgtagcctgcttcccaaccccggcgggagggaggccgaaataggagtcgtacgccggctgcggcggacgtccgggcttcaggcggggcggcgcacgtctcgcgggttgctgagcaggatctcagagggcagcaaccgtcgccctcaaacgaggtccgactctagtccttgaagagggagaggaccgtctcgtacgtcctgcatgccggcgggagcggtcagcaagcttggtccccggctgatcaggtgctacgcggatgactcacaggaagctgacggcctggctcgggctgactttgagcaggttcggccagatgccgcggtacaggccgcggaagccctccttctggacgatctggatgagcgcgcccgtccccgacgtgtagttgtacgcgccggcgaccttgaccgcgcctgggaggggcttgaggccgacgacgtgcatctttcgccggacgaggtcgaacgggtacgtcaccgtctgcgagatagcgccagcgatcgagccgcagaggagtttgatcgaggcgtctcggccccattcggtcgccgtcgccgccccggccgtcggcgcaggcaggaggagcgtccggaatttgtcgtagagcgtgaagttgagggcgacgtagggcgcgacgccgctatgcaagtggagaaggacagtcatcagcgcgcctttcatcgtctatcacatgtaagagcgagcgctacgcacgccgaggtcgcgccgcagccgcggtaaaggcccttgagcttgccctcctcgcgccagactttcgccgtcatcccccagatgccgagaccggcgccgtccttgccaagctgagcggcgctgatgctcagccgggagcggacgaggtcgagcgggtaggtcgcgcagactgaaaggatgccggctatcgacccgcacccgagcttgcgtgcggtcgagagctcgccctcgagcggcttggcgaccttcttcagcatctcgtacgacgtgaattggacggccgagtaggctgtgcacacgagggagggcaggcccagtcagcccgggcaaatgagcgatgccagagagcgtattcggcactcacgcatgatgcgcaggacgttgatcccgttcccccgcatgtaccctcgccagccctcctcgatccacatcttcttcaagctcggccacacgcccttgtaagtctggaccgtctgcgagctctggacctgcctgcagacaacaagagagcgagagaagggatagttagcactctctggtcgagcgcgtgagtgacaggcaggccgtacatgataatcttgagccgctctaacggcgacacgactgttcgcgaggtcgcaccggcgaggccgccagcgatgaagaactccatcagatgctgcagcacagacatgaatgagaaggacgggagtcagcgtctgagtgtcatcgctcgcacgaccttcttcctcgtcggctcgtcggctttagcaggcgcgccgagagcaaggacggagctcagccgacaggcacggagccggtcgccgtccgttcggccaaaaggcaagctttcatgctcatacgcgggacgctcccgtccgcttgagatgggacggacctggttacgcttgaggaaagagcgctggtcgagctcgacgccaagtgccgtcgtcggccctggttccgacgccgtcgacggcgggaccgcgttcgagagggcgacggcggcttcggccgggtcgaccgccggcgcagcggcgaccggcggcaacctgatggctagcgtaggcgacgacgagctggccatgcgacggcggacgggacgagaggcggtttaaagggtgacacgggcgacgacaagagagggagagagaggttgggggacgagcaggctgaggaaacgcggaaggcggcccgctggcgcgctgcggggtctccctttgactcggaggctttcggtttgggtccggaaatcgagtcgcgcgcgcgagacgcgtcctgcctgccttgtcctgcctcgtcggccctgccttccctcaccctccctgcgctacccttcctccctccctaccctcacccatcttgacggttggtagatgctagcttgttgctcagctcgcttgctttggcttccctgcactaactcgcctgtctcggcgctcgcaggaacgatggccggtgccagccttcctcgcgacgcggcgaacgcacccgcctcgtcgtcgtcatccaccgctcgccggcggtcgcatcgcctgtcgctcgatgcacctttgtgcgtggccgccctactgcgagaagctgctttgtcaccgagctcgtcgaagctgacaaccttgatcgtctcgccgccgcctctcagggacgctttggccgtcgccgatggcgcgcacctacccgccccgctcgtctgggagtggcagcagacgaccagcgcggccgcaagccgctcaggataccaaacgaagggcactcgccgtcgttcccttcggcacgtcgacgcggcttcgagcagcttgtcagccctggagagcacgcgaggttgccgtcgagccctccaagcgctcgcgctcacacccctttgtcctcctcggccgtcaagcggccgaccattccaagctcctctgcctcccaaggccggctctgaagctcggccggcgcctccgcttcctactcggcgctctcttcgacttcgcgggcaaatcgagcctgggccagcgctgtcatcggtggacctgcacgcacgcccggaatggccatccggcactcgccggccccttcggtccaacactttactcacagacctcgccgtcagcaccctggcgagtgcgtctcacaagggcaaccggaagagaccggccccagcgacgactgccaactccgcggcagcgagtcgagctgcaactccgagtgacaacctggtcgaagcaacgcagacgacgtcctcggcaacctctccctcgtcgacagtccggcctcgtatcgcgcagcctactccgccttgctcatgccccgtgacgccatcgccatctctgtctgtgcgcatcagcgactccggcacgcgcccggcttccccgcttcgtccgcgactcgtcgcgccagccacgccgccgccatctgtgcctcgcaccgcgcctcgaccaatgagcggcggtaagcgcacgccttcagcatccgcactcagatcgccgaggacgccgggctcggcgcgtctctgcggctcttcctcctcagctccgtcggccagcaccccaaccgcgcgagggctccagaccccgctctcgtcgtcatcgctgccttcttcacgacttcagacgcccggctccgtctcctccttcacctccttttcatcgcccttcgtcgccggctccccatacctcggcatggcaaccacacgttcggccgactcgtccggcccatcgacgccgctcgccaagcggccgcgcctggtccatctctcgtcgctcgccggcagctcggtcgaaggtagtcccaacggcggcggcggcgacctcagccggcgtgggctcgaggcggtcgagagcgcctgggcagaggaggactggggcttctgaggtggaggttggcgacatcgcatggtgctgttgacgcgtggacgagcgggtgtctgtgctgggtcagcgacgagcgaacgagttggaaggatgacgagctggctgacaacgttcgagaattcggatccgtctgcttgagtggaggcaggcgagccgttgagctgattcgtcgcttcgtatgcttcatcagcttcggccgacggctgtaagcagatctcccccttcatccgcttgaccatcgttcgactgacccgcctaatcgggttgcggtcgattctgatcgacagctagggcgtcgacaagctcggccacatcgaggggcaaacgagccgcaagtccctcgtcgagcttcatcgagcgagctacgacggtctcctcggccaaaggcggccctcgcccgaagagccgttttcatgcccgccgagcccgagcgcgcgcgcgcgcacgcgtcttgtttacgcgcagcagcggaccctcggtcgactcggcgagcgcgctcgccgaaccctccaccttactcaccagctaacgccttccatccgctcgcaaagcagcgagggaggtgcgacaatcctcccttaaaggcgtccgctagtcgacaagcagctttttgctccaaccacctctgtccaaccaccgccggcgcaggccgcccgccgccctttgccccccttctcgtcaggcccgagcgcgccgtcaatcgcatcatcagcagcagcagtaggaacgggtcagcagcagccgcctcccgtgcggagagagcgcgtcaagctcaagccgcctctgccgagcttcaggcccgtcagccggaaagtcacccagcaacagccggcactacagagggtgtttggcggcgagctcgacgtcaacgccgcttcggcatcggctgctgctgctgctgccgctcgtacgaacggcaagccggcgccggcggcttccagcaagggactcaagctcggccccctttcgaccgcttctgccagtcgtccgacagcgacgacgacagcggccactgcgaggtgacgcccttcggtcgcatcttccgtcccttttcttccctttaattagcggcaacgtgcgcgcccgtgcgcagagatctaatggaggcgtcttgcattgcaggctgggaggggaagggtccgagtgagtggcggagggcgtggcctggggagccgaggcaatgtgacaggtctggccagaccacgcttcccttcgcctttgtccttcctctacacatggtcgtcctctcatttgcttgtcgggaggctgcgggggagaggagtcgggccgctcgcctgtcagcctgcaagctctcgcccagcgtttgaccgccaacgtgaagagaaggtcgcccgtcggcaagccaagcaggatgcaaagacgacggaccgcgcccggcaggactgaccctcttgacactcttgctgctctcaggatcgatggtggtcgtcgacaggcaggaagctgcgggcgtcagggcgaagcaggcggccgcgggcgcgggcgcagcagcccagcgacctgcgcctcgggacccgcgcccgcggcgcccccccccctttggctagccggccaccatctgattggatcgccaccagacaagtttttggcaacctttcctgagttgtgggaacccagcggtacctgtctcgtagcgatcccataagatctcgtcaaaaaggtttcggcctgcgcagggacgggatccctgaatcccccttccgtctttttccggccgtccctgtgaccagatcgctggcagactagtttctggcgtctccactggtcctgggcgaccagtcaggcaaagtttcatgttgatccgataaaattcggtcaaatcgcatgtatcccttgcatgggaacgaccggggacaaggcaatgagacaggtctggttggggcaaccctagtccgagtcggacccgctgccgggaccatctgtcaaagcacaggccggacggaaaggatcagccttgaagcaccgcgagtcgaccgccactcgcgagtgtcgtggggacgtaccgcgctcatcctcctggacgacgtccccaagatcgacgcctccgacccccctgccctcgcgccgcgccgtgtcctcctcttcgcgctcgagcagcgcaacctgctcactgacaacccgccgaagctcctcgtcctcggtcgaggacgacagcagttcgggagccgtctggcggtgcttgttagggatcgtcgtgtcggcgcctgattcgagcagcaggcggactagggagcaagaggagagcgccttccttccgttaaaatcttgtgcgtgagccgagagtgtcacgcgggggggagggggggtgcgcaccgagatacgtccgcagctcgccgtcagagacgcgcatcgccaggtgcagcggcgtctcgccgtcgattcgggtctggaggtcgacgtcgcattcgtcgtgctcgaggatggcgtcaatcctgtgaaggagagggcgaaaaccatcagccgtcggcggaggtagaagcgactcgcccttccccagcgcaatccggtgggaagactgcgcgggcccttgagctggacctaggagagccagggagcggagaggccgtacacgtcggtcgaaccgcgctggacagcatagtggagcgccgtaaatccgaggctacagagaggcaagtcttcatcagcttctcttaatcagcagatatggagagagcaactgaaagggagctcggcggctcgggttcggaggaagcatgcgcacccgtcctggaagttgatgtcgaacccgccggcctcgtacacattttctgcgacgcgaaggctcgcgtatcagcgaccggatcgtccggtttgtcagagagagaagcgaacggacggagcagctcctccgaatcctgcttggcggcggccagcagctgctcgtctgcggttcgggggtgcagaaggcggcggagtagtcagcgtcaccgcccagtctctgggcacagagcatgagggcgtactcggagaggctccctcgtcggcggccatgtctatgagagaagagagagagaaaagggaagaaggaggtcggagcgaagggggagtcgatgttgcaggataacgcgtcgaggcgagatggctcgcctgtccctctgacgagccaccaacgtcgacaccctcggaagcccgctctctctccatcctatcaagaacgaccagtacggccaggcaaagaggccaaggacagtccccttacacctgccgtcaagaaggtgggttctagtgagagtatcgtcgccgggcaatggcttcgtcctcgtacctcccgtcaccgccaggctcgccgacgtcgagcggccggccttcgcactcgctcgacctaccctcgctccacccgctcgaccactcgcacccgctcctttcgccgacgagcacgagcacgttcgacccggatgcctttctcctctcgcggctgccggcgcccctgaccgagctccgggacgagctccgggcgtaccaagcccagctcagggccgagctcgtcgagctcatcaatctcgactatcgcgagtttgtcgagctcgggactggcctcaagggcgagggcaagcgcctcgagcgcgtccgccggccgctgacgggcatacgccaggacgtcgagacggtccggaccgagctccaggcgagcgagggccggctgcgcgagatgctcgagcagcgggccggcctgcgcgaagagaagacgctcgtccagctccttctctcgctcaccgattcgctttcgcggaccgagacgctgctcaaaattgctccgggtgtcgctggtgcgcagggcttgccgtctgctgccgctgtcggaccgccagtaacgggcaaggccggacagcccgcgctcagcttggtcattggcgccgcagaatcgtccaaggcagacccgtcgtcgagtgggccgggcggagggctcgggtcgagcggtatcgccgcgcgagagaaggttgtcggccgggtcgcggcagagtacacgcgagtgctctacctaagcgaaaaggcccgcaaagagggctgcgccctactgggcgaggtcgactgggtctgtccctcgcagccagaccctatcagctcactgccgtgctgacgctatgccgctctgctactttcgctgcgccagaggatcgagcgcatccgtaatacgctccaccgcgacctcgatcacctcttctcggatacgcttgctgccatcgcccgcgcgtcgccgtcgtcggccgcccgtgagcgcgagaccttaaccgagtgcctaaaggtgtatgccctcgtcgagggctggcgggatgccgaggagctctatcggcgagaggtcgtccggccgcttgttcgcaaggtgcgcattaggcagtctccgcccttcaaaccagatgcgccgctcggctgacaccgttgggaccgacttgcccctgcgccttaaagctcatctcggcaggcacgctcgacacaccgatcgagcctgctcagacctttggggcatccctctcatccaccgccctctttgcggcggcgcttcctccagcgacacccgtcacgcccggcgccgtcgtccccgcgacgccgatgacgccgtcgacgcccttccggcctgggatgacacctctgaccgctggaggtccttccgagcgcaacccgttcgaggaacatctcgtgcagcgcggacctcagctcgagagccagacgccctttgggggcctctacaaccggctgcttggcgcgctctcaaagcccgaggtgacgatggtcctccaggtggcctcgctccttccgacgtcggccaacggccaggtttcggccgacacgaccgacgacgagggcgaggagggcgacgggcctggctctgtccccgccggcaagaagggcttcgagttcttcgccaatgtcgtctggaaggaggttggcgagcgactcatggacgagctcggcagcgtcctgtttgccgcaggacgcccgtcagagctgcatcaggtcggtctcgcttccggctcgcctgcaggtccttcactgaccgacatatttcgactctgcgctcagcactacacgctcacgcacgaattcttcgcgctcctcgagagcctcgcacccggcccgcgctcgatcctggccatgcgccagacgccgacgtacaagacgtttcaggctcgctgggggctcggcgtctacttccagctgcgttggaaggagattgtcctgccgctcgaagaggccctcactgcggctgttgctggaattgagaagttcagtgcgttgcaatcgccgcttcctgtactggcgtggccgaagcattgactgaacgctcgacgcacgcaggctcgaaggacggcctgcatctctcacaaactcgcgcgacgctcaaggcgctcgaggccggctgggacgacgcgatctttgtgcccgagctcacgtatcgcttctggaagctcacgctgcaggtgcgtcggctctgataacgtcccgacatgcagcctcggctaaccccctccctctcactcctgtagatcctcagccgatatcgaggcctcgtcgcctcgctcgtcccgcccgtctcacagccaaaggtgcgccagacatcacagcccatgcacatattctcagctgctgctgatcgctgcaccatcaccacccatcctcaggccgtcacgaacgatgctgcggcgggcgacagcgcgcaaacggctgaggaggacaagagcttgagattggcgacgctccttgtccgcgaggtcggcgcattcgagtcgcgagcttggacgacttgggacgagcgtatctcgagcagggtccagaacgccgacgacacgcgcgacgacggctacgatgacgacgagagcgatccccaaagtgcgtcgccggcctcgtcatcttgcaccaggccgagagtgctcatgttgaccgcctcccagatgcctacgccatcgcgctcggcaacctcggcgcactcgtcgagccactcttgcgtgtcatcgtctcgatcctcgcccggcgttgtgccgactcactccgactcgtccgctcggttgcgtcgcagtaccgctcggccggcatcaagcgcgagccgacggcggcgagctactttgtgcccgcgatcctcaagccgctgcgcgagttctttgatcgcgagcgcggcgggcttgggagtggcgtcgaagtcgagtacggcgcgagcatccggaccgccgtcgtcgaggacgtagcgcagaggtgtgtgcgcaacgtcggctctttgcttgcaagccttgcctgaccatccctctgtccgccagctacacgaccgtcctcgccgccgtgcgcgagtcagaggagaagctcgcacgcctccgcaagggcaagaagacagcattctcgctcttcggctcgtcggcgagcgccgcggacgaggccaaggacgctgcccgaatcagggcgcagatggaactcgatgtgctcgctttcaaagacgaagccagcgcactcggtgtcgacgttacaagcagcgaggcgctgcaggagctggtgaacgcggtcgggcaggaagcggagggcactgctgccgctgcatgattttttgactggcaagctgacggtctcgcgggcaaaggaggtgtgcatgtgggcatgacattggtgtgaggaggaacgggcgaggacgagagtcgacgcacgagtccggcagtgctgaccaacgacggcgaggttgagggatggaggcccggcgcggacaaggaggctagaggacgggccgacatcgacaaggtcagtcggaatgcgggccagagcggtgaggagaaagacggaccaattaggagcagccaacaggccttacatatccaggtccctagacggcgaccactcgacaccagcgatgtcgacaaaacggaggccggccttccggacgtcgcgagcaatccgtgtcgagtaaatgcgcttgtccttcaatgtgagtctcctcccctccatgtcaaaataccagtctgcccgaacgtttgccaaggacggaagactgccggcgacgcccggaagatgtcgacgagcgagcgctttccggtgtcgggcgcctcgacggtgacgagctttggaagaggttgagcaaaagcggatggtaggtcgaccctctccaaaatgagcccgcccaggcgccgcatcgagccgaggatgccaggcggtacgagaaaatcctctgcctcatggtgagcccaaagagtaggtgctgtacgtccgaagccaggcgcaggaggtcgagcacgaccggcaccccgctctgccgcaagtcggtgaggtctaaacggcgcaggttggcgagagtcggcgtcgttccgaggccgaggatgtcgggctccggaagccagtcgaactccacgaccagcgcatggagagactacatgtcaaagacggccgggagagcgacggccgcagtgaacgtttggggcatgttagcttcttcgtccgcgagtaagatctcgagcgtcttcaaccgcaatggcgaggcagagatcttgtcggctggcagaagcccccagaaggagaactagctatacttctggaggttcgggagcagtcgctcagcccgggcgattgcagcaaagtcggtttcgtcgcagtcggggccgaagtcgaggtgtcggctaatgcgaccgagggtcggacaggcttggacgagatcgagcacgtgccggctccctccgcagcctgagaagagccagctctgggcttcttcctggaagcacgtacaagggagcaggggggagaaggagcgatcagccgtctgatctcgggcccccgcctcgaggtttgacgaccggcaagtgtaggggacttactcgccaagccgacgagacaaggctgagggcggagagagctgcacgggcacggcgaggatcgcgccattcacctttgtgactgatggccgcctcgcgcaggatgaggagtgggacttctggacttcgatcggcgctcgaggttgctggcggttgtgctggtcgacgttcttggccggcgagagggagaggtgagcagggcagggcgacaggagttcagtcagctttgagtcggcaaaaccccggcttgtacgagccgctggctgaagcaagggctcacgagacgcaaggagcggggcatgctggtgttgacgaatgagggtgaggaggcgagaccgcaggatgagggctggagaaggcgtaggctgcaaattcagaagctctttgagggagagagaacaggacaagatgctgtggggccagcccacgcgactgcgaagaccggagagggcgaacaaaagggacgttgataaaggggtcaagccaaggaaaccccgcagcgaggtttgaaacgagagcctggcaaccactgccagcagagcagttctgtcaagagttgggaggtcctgatgtctgatgtctgccgaaagagtcgagatggtggtcggacgtgagggaagggtcattgggtgcgttcgcctaccagacggccggggttcctctggtgcctcttgttgagcagcatctgttcgctgcttgtccctgccaacccttagcgtctcggacgaatcacgtcacgaagctgtgtacaaagggaagaggagaaagactcgcttgcacgcgcagatgtattggtacaggcgagggaggtcgtaaagcttcaagagatgaacaggggaagggtaggcggtcaagagtcgtgaggggtgtgggcgtgataggacgtgatgggtttgtacggtaggagaggcgagcgacggggcagaagagaccggaggaaacgcgggcggaggttggagactggtagggggagaaggtgctgccgctcgaacgagacttagacggctgcgacagggtggtggtccgacttcgaaggcggcgtcggtgtcgccgtccggctgatcgagtttgcccggccgccccagaaggcctcggccgaaggggtgacgaaggccatcggcggcgagggcgtgctgaacgtcggcgttacaatcgtctcgaacgacttgggcgtccaggccttcggcggcgtcgtctggagcgaggggaaggcagcggccatgtctagcgagaaggggctcgaggtgccgctcgtctgctggggcgtcaccatgcccgacgacaggctcgtcggcggcgactgagggttcggcggcggcgacgtctcggatcggaagaagcagtacttgtcgatgctgccagagggcggagcaaaaggtaggcgagtcaacatcggctcaccgtgatcagggatggcgaaaagggtcgcacaagtcggcatagctgtcgctcggaagcttgaagtcgcgcgtcggcggaggctgagcacgcggctttggcaggaggggcccgccgccgctctggatgggcaggccgaacggctgcggcgtctcggtcgggagcgagttgggcgttgacggcagcgggctggccgtcacgctcccgggcgagtgtgaggccgacgacggaggcgaggggaggccgcctgccatcgtcgcgcccgtaccgccgaccttagtagccgtcatcgcgggaatcgggatcggctggacgacgacctggggcagtggaggcgaggcgaccgtcgcgctgctcggctcgggcttgagcgggctttgggccggtttgacgggcgaaaaggcgtcggcggcgtcccacgtcttcttgcgggcatgcgtcggtcgggtcgagacggcaggagccactccggaagccgctagcgatgaggacgaggaccgcgagtgagcagcaggggtcggcgtgtctgcgccggtcagggcagaagaggcaccaaaggtcggccggacaggcgaagctgccgcgctcgagagggccgtgctgctggccgacgacgagtcgtctgccgacgcgcgacgggccgctgatgggaacgaccacgcggccgagacggtcggctgggtcggcgtcggcctcgtgaagactagagggccgtgcgtgctcggcggtggcggagggcgagcggtagcaacaggagccgcttggggcgacatcgccgggtgaggcgcggtcgagatgccctttgactcgagcagaggcaggaaggcactgccgccgttcgaggagacgccggcggccgagctcgtcgccgtcgtcgtatggcccttgccgccactgccgccgctcgtctgccgggccggcggactgggcggcttcgtcttgttgaaacgaaagtggtagttctggccgccgagggagtcccagagctcctcgccagagccatcaagcgtgtagcggatcgcaagcagcagcgtgctctcttcaatcttgcgccggtgatcctcgagcttgactgtaaaggcgaagcggtcccaacccttgccaattgggtcggcccggccgagcgaagcagccgaaatgtggacgacgtgcgaggccactacctcagagatggtctgccagttgtcgagagctggagattgggggtcgtcagctcgagtaatcatgtgaagggaaagaaggggcggctcactgaaccggacggcaacccgcttgacaaagctgaggttacggacgacgagactgcctcggaggttgagcgtcgcattcgcgcccgagccttcgtcgacgagcgagacgctctcaaggacgacgttatcccactcggggacgctcagcggccggctgctgccgaccgtcaggttgagcccttggatccgtggaatccgcgtgctctgcgaccagtccatctcgaccttctcgcgggctcgcgccgcgttgacattgtggtggaggccgcggcttccgctcgaggagccgcccctgccgccgccgggccaccagctgtcggtttcggtctcggtgtcggtcccagtcccgatccggtcgaggtcctcgccagcaagcgcacgcgtgacggccgtcaccttgtgctcgcgcttgaagaggacgaccttggcgagctggccgtggctgtcgccggcgccgtcgtcatctgagtcgcctgcgaagcggagctggcgccgctcggccgtcccaggcgtcgttggcgttgactcagagtgcggcgtgggcggctcagaccgcgcgcgctcccagtagccgcccgacgactcttcgggccccgtctcgagcccggccgacgacggcgttgaggtcgaccgccgcttgagcgacgacttgacgacctcgcccgactttttccggaccattgccggcgccggccggtccgacgaggcgctgctgctgctcgggccggtcgtttcgccgttctggtggccgtggtcggtcgacgacgtcgatcgagcgacggcatgggcttgtgcgtggtggtggtgcgccgggatgtcgacgcggagcgacgtcggattcgacgggttggcccggcgcgagtggaggttggacgccgtcggcgacgagagcggccgggagggcgacgggcgacggggtagcaggtcggctggagacggagagccaagcgaatggagatcgaccgtcgagtccgacacagatgcgctgatgctgaggccgagcccaccgtcaggcccagcctcctcggcggcggcgtcgatcgtcgactccgtccggtgctgctccttcgacggcgccgccttgtgcgaggttctccgcggcaggatcaggccaggcggtgcaggcgggctgacaacctcaccgacgcccggcccaccgccgccgaggacagccttgacggccgccggcgagcttgacgtcgcccgccgagggagcgtcgcccgagggagcgtcgactgccagtaaggcgtcgaggagtgcgagtgatagccgtggcggctcgatgagccctcgggcgcctcggcagacgagtgcgtccgacggctcgacggcggaggcggagggaggatgaaggacgccgtagagcttgcggctggcgacgtggggttagagtaaggcatccgagaacggcgactggagacagagggagggccgtcagcaactcttgcgcacgtcgtagacgacatcctgctgacgcaggcactctggcgccatctcggcacgcccgacgacgcctccagggcctatcgttctggtccaaacccattgcttgctcggcaagagggggtgggcatctgctcccgtcacccagcctcacgaccaacgtcgcctcggcgattagcaagtcctcctctgcgtccttatcgtctctatgggaagagagatgagggcaaagaaggaaggccgtcgacgagccggccgcgccttcgccgaccttccccagcatggccaaggcgtcccgacccgggtcatggctgggaatccgcagcggccggcgccctcggtagagggacatccctgcccgctcaagcacccagaccggaagaagaacaagctgatggaggtagcgcaccttggaggaagagaaaggcctgggatctactgtcgataccgtcggccggaagatgaaagggcaggaggagccgaggagggttatgacgccctgggcggaggcggcgcgcgcgcgtagaagggttgctcggaggggaggaaagaggcgcgctgggaagggaggttggcgaccgacagtcagtcgtcgtcgttcgtcgttcgtcgtccgtctcgcgtctgccctcgctcgcttcggtgatgggggagagagggaggaagctgggcgtttggagagggaaagaggctcgctcgctgggcttgtctcgtcgcgccgccgcggtcggcgcccgccgccgagccaaactactcgacggcaggacgaggcttcaagcccaccgctgctgcaccacgcccttcccggcatccggctggaagatagcgccaactgctggtgctatggtggtgccttctgcgccaagcgaggctccgcagggaagatgagcccgacccttggtcatccctccgaagggaaacggcaggtcgcgacaagggctgaacgccgcagcgtcacggggcatatccccggggccggccggctcccgattggccttgcgcgtttggcgacgacgctggtcctgcaaatcaagaggagagggacgtacctctggtctgatctagcgacgttgaatagatacaaagcgctgaccgagcgtgaactctcgtcgcggggcgtgtgccgtcgtccttcctttgctgctgccggcggcgacggatcgtaaatccatgaggctggggtcctcggagccagccattgctgcgcgccctttgtggctcattaacgactgggtcgtttggctccgtctcgccctctcttctttcgaaccaaagaggcagagagggacgcgccgagaggaagacaaaggccgtctgcatccgacacgagagcgttcacttgcctcgccacgacgacgacctctactggactactgaccatcgctgttgaagacgctgaaaggctaatgattcgagagacgccaccaccgaccctgagtcctgcctgacccatcttcgcggcccgcaataatccgtgggcagagggcgttcgcatccggctgacatcgccgcccgcggcctttcaggcaaaggggcttttctttgtggcttgcatcgcctcaattccctgacctcgacgctcgcgaatcgggccggacttccgaatggccgcctggtgtgctggccggcccaacggcgatctgcagtgagccagcagctgaccagctcgggatgtcttgggtcatatggaggtgggggcccccaaattgctgacccccgtctctcgccctttcccttagtcaacgtcgatggcgccatcgccgccgccttctgcgacctgctcaactgcacgggcgcgttcaccgaggaggaggcgtccgagtacctgaagattggcacgctcaacggcctctttgtcctgggccggtcgattggcttcatcggccactaccttgaccagaagctgctcaagcagccgctctaccggcacccgtcggacgacttctacgttcgtcctttttgttcttttgcgtgcgttcggcttggccttgatcgcggtgctgatgcccttaccggttccttcagatctcgttcgccgataactcgcgcgtcgtcgtccagcccaagtagaaggcgtccgtcgcctcctcctttagatttcagccccgcacctcctctcgctcggcgtcgttctgtcccactcgcttttccctcttacgaaccctctctctctctctgcttcctgtttcttctcttccgggctctcctcccctctctgtccccgcgcagtgtgccgccgccgcccgagggcgcacgcacaccacgctccgctcgcttgtagacgacttcctttgctctcgcatgccgtgacagctgcctctcccgccttcgccccctttgcgtccgttaagtgctcgcctcaataatcccatcgagcgttccagccgatcgaggaccccgatgctggctgctgctgctgctgctgcgcccgcaccgcgcgcgcacccgagccgaaggcagtccttcgagccagcagcttctccctgtccctcaacagccaacccacttcccccccctccctgatctacctttcattatggactccactgtgcgttctttctgtgctggcggcggggtagtcctgcgccaagctggtctccttctccttgtcggccctcgcaagcccgccccatctcgggcggcacgccaggatcaactcacctccgctgctgctccctggtcgaagctgctgatcgtctcggaccttctgcctttagtcctcgcccgcaggtaacctgcatcgccagccgtcggcctcgtcgaccatgacgtcgaccagcacgcacacacactcgcaccggccgtccttctcgctcccccgggacccaaccgacccggatctgccgacccgcttccgccgcggctcgaacgcgagcatgtcgacgagccttgccggtctcagccgcgaggaggtcgaggagcgcgagcggctcgtcaacgactatgaggccgaggaggagcggctcgtcaatgtccttggccggcggatggaggaggttcggcccttcccttgcacaggcgaccctcctggctgagacgcgcgctgacgaaccggcctgtcttttgtgaactcgaaccagatgcggggcgagacgacgagcatgcacaacatgatggagggcgagtctgaggcgctcgtcaataagctgcagcggtgcgtgccggcccgaccccatcaaacgaatcgtgcttgctgaccgggatcgacttttcacaatcttccctcccgtcgctcgcaggcagatccaggcgctccaggcccagctcgctgcccattcgccgtcgtcgcccatcctgcccacgacgacgtcgtcgaacggcggcggcgggcctggaggctcgccccggatccaggtccagcagcagccgctgtcgccccttccggcgcacggcctgccgtcgattggctccccggtcctgcccgcggcctcgctcgctactctgctccagggcggcgacccgctcaacccgagccaggagaaggtgtttgaggtgctccgcaaggagaacgatagcctcagggcgcgcttgtgagtcggggttgcctgctgggcgtcgccagaggcagtctgatcagaagctgaacccccctactcgatttgcttgcaggagcgacgccgagcgcggctttatccacgtctgccggcagaatgacgtataccgcgacgagctcatcacgcttcgacagcggctcaacctgccctaccaggacctctgcttgccctcggtcgccaacccgtccaacacgacgcacctctcgtctggaccacgccatccgggccgccagcagtcgtcgagcggccgatccgaccactcggtcccgaaccgccagttccggccgggagcaggccaccgcaaccagtcgagcacgcgcgagatcggccacgatctttcggctgcaggctcgtcgagcaattcggcgctcgaccttggctcgggcccgagctcgggccagggatccgcgctcccctcgcctggcatcgcggccggcgctagcaacccgttcccgccgtcgcccgaggtcgagcgtcggctcagcatgggtacgacggccgaccggcccaactttcgcgtcgcagagcgcggccagctccggcgggtcgggagcgggacggcagatgctggctccggcggaccgctgtagcggatggctcgccgacatgcaccgcagccattgctgtgcctgtctcggatgacccgtctcgctaggcaccgccctgatcaaggctcgttctagaaacccggcgccggccgatatagccaggcgccttctggccgcttcgagcatgcggtctacgagattcatcctgccgaccagtcgttcagacgcgcccaaccgccgcctcgacatgcccctcttcctgtgctgcactgcggtgcgacgccctcccatccaccttccccccctcttggcatctgccggtctcctagtctactgcgccctcttcatgcgtttctcccttttccctcgacaacctgcgtctttcctgcctggctctcttttgatcgtcgtctgcgcggacgagcgctctgcaggcaaactcaggaagagatgggccgcgcatcccttactcgtcgactgttgctcgacgctctctttgtagccgtcatcgcatagcatgacctgtcttcgctccatttggcttgacttgccttggatgaacgcatgtcggttgacctagccagctcttgaaccgtagctcaaaggactggcctctggtcgagacagaaacgcaagagagctctagcgcactctggagggaagactcacgaccagacgactgaggcacctttgccggcgatcgtcgtctagacacggccctcttggtccgaacggatgagggagaatgatgggcgatgtgaaggagatgtttgggctgggaggagcggaagctgatctgcgagcggagggcacgtcgacggtcgctctaagattttcaggtaagagctgcgagcgtcagtgactggcagctttcgttagctgcgggccgaagtcgattcgaaggggcaggtcagcagcagtgagttgactggacggtcagccggtgggggctagagcctcctttttcctccgggcttgccgggggctgaaacggggcgttccgccagcaggtacggaggcagcgagcgacgctccttgacgccggtatgtcgcaacggcagcaggactgctgggcttgaaggcacgagacgtcagcagcttgcgaaatgcccgctccgacggcccgtctctcgtatgtaggtgcgacagaacgggcgtctcggggcgaaaaggtggcgtttgcgggacccgagccggcggtctcaaaacgcgggccagagtcgcagcgagcgagcaagcccgcccgccctcctcttccctccgaacgacgaccggggacagcaagcgaacggacgacgctctctctctctctcaacactgccccagtttccctttgtcccgaccaagcccgtcagcccatcagacgcgcgctcagcttccgccgccttcctctcctgacgtgcggccaacaagccttcagctctcgcgcccgccttcttccgccccgcctcgcctgcctctttctccgctcatgggcctggccacctcgtctccttccggtccaggcacgcgcaagcagcggtccaccttcacgcttggcctcctcctcgccctgcccgcggcgaccctcctctacctctggagttcggccggcgcggatccgaggttcgccggcgccgcgctcgacgacgtcggctttcgcacgagcctcgacgacgcgagcacgccgggcgatggggcgctcgtcgacctctctggcctccgggtcggcatccaggtgcgaccgtgggtgccgagacgcgctcgaaggaagcagggagctgacgagcgtgccctttctgcccgcaacctgctgtcacctgctcgctccgctgcccaccaccctaccccccatcctccaggacgccatggacttccacgaagaagtcttcggcgccgccatctactcgtttgcccatgcaggcgcccagctctcaacctaccacccgccctaccgcgccggcttctcgctcgtcactggcccgctattcgacggccggtcgccgactcccctcgagccgcccgcgaacctcatccacgacctcaagcacggcgcactcgacctcgccgtcattacctcggccgacgcgggctggctcgaccgagatgtcgtcgacgcactcgttaaggcagagaagacgcaggccatcttgttcttccatcagatgaaggactttggctcgcgggcgcagagggaggcgctggcgccgcttgcgcgcgaacggaggttgacggtcgtcgggctcggggaggtcgtgtacgtcctcttcctcctctctctctctggtgtcgtcgcgcagcctgactgactgcctgtttcctcccctgggcggccccgcaggacaaagcagctcagcggtcatctggccgaatgggcgtctcaggaccgagcgagcgcttggtcaaaagtccccgtcgagctctttgtccctgtccgtccttgccgtcctcgaacaacgccgggagggtgtgcgctgaccgtttatgcgcgcctctgctccagatcttccccgtcccgacgccgcgccatgccagccggaagcacactgtgccctcgcgcgtcgtcatccaaggcggtatcgtccattcgcgccgaaagtaccacgccatcctggccgacctcgacgccgccttcgcggccgacccaatcgcatggggctaccggccgtcaacgctcgacccgagcggcgcgccgttcgagccgatcccgggccacccagacgtctttacgctgcacctcctcggcttccgggccgagccggtcgacgtccctcccgcgctcgagaacgttgtcgtcttccacggcgacatcgactaccggacgtatttcgacgccctccagtcgatggacctattgctcccggcctttgcgagcgagacgtacctcgagagcaagacgagctcgtcgattcccgccggcgtcctcgcccgggtcccgattctctcgagcgcgcgccatctcgcagtctacgactatctaaggccgccggcggccgtcggccatccgaacgacatgagcgaggttgaggcggtccgccgactgagggcgcacgagccgctctggtcaaccgcgtcaaaggcgctcgtcccgccagaatggctcgtggaggcgaggcaggacgccaagacgtgggagaggtatcgtggagggctctatgccgccaacgaggctgcctggacgagggtcgccgctcggctccactgaaggcttaacccctcccttacgatcctgctgtacgaccttacgccccccctccctaccaaactgtatcgcctcggtcccagtgatctcgcctcgcaatcttgcacttgtcttctccaccatcacggcatctctgcacgtctggccccttcatcccgcatctatccgatgctgccggacgagatccttcttttggcagtgccatcgtcactgaaagagcagcgatcacttgcagcagcttgcactgtcggcagggaccttggcagccgctgcctccatcatctcgactttgccctgcaggcctcaatagtaaggcggagggagagactgagactcgtctgacccttcgagtcgaaggccgtcagccgggcttccgcggtcgatgcttgtcaaaagggcgtcccgcttggtacccctccacccgacttggctcagcgcgtgcctgctccttcgaagcccactcgcaccagatcggacggccagaaggctaggtcgcagcccctttctctgcgccgacggcccggacggcgactccgcggaagactcgcgcgcgtggacctgctgcgcgcgccctcgtcatcggccggtttggactcgccacccggggcgagtctctcgctctcgagagatgcgaccgtcgcctgcgtcccaaccctcaccttcccatccatcttccctcccctctctccctcttgctccatatcgacaagcatgtcgaccactgacctctcgcagcaacacgtcctcccgtgcgtaggctccccccgtctggcaaagcgcccagcctgacccatcgcatcgcatccttcctctccatctcggttgcctccgccaacagagacaaggcccacgcccttccgaccaacacactcgtcgacgaaactgcccggctcgcaagcgcccaccagtcgggcctcggtggtcccgccgccggcaccgctggctcgactggcacctcgaccgccgaagacctcaaggagagcgcccggcgccaggtcgaggcccgcctccgcacgagccaagcaggtttgtcccccttctactcgccctggcttgtgagacgacctgagcagggctgacgacttcgactcctccttccagacgccggcagcagcagcctaatggccagcagcaacccgacgaccgatctccagcagcagcacgcgattccgttcgtccgcatcgcactcctgtcgcgccgctttcccttcctgacagcttccttccttctttcgcccacagcactcgctcgaccgccctcccgaccaacagccttgttaacgagacggctcggctctccctgggtggctcaagcggcctcggcggctcgtccgtccagacggttggcaacacctcagcctcgttcaccccacacacggcctcggacgccaacacgtccgcccacgccgttgcccctgctgacgccggacccaaggtcgctctcgagggccagcaccagcagcagtcggcatcctcgtcggcgctcccgcgtgagcaggccggcctcctgtcggatcagatcccggtgccggtcaagaacgctgccgcccaggcaagcgatgtgctcgcccgccagatggaggccgccaagcagggcctcgaccacgccttcaacaaggacgacagtgcgtgcccgtcttgtccctcagcaggttgctcttcgttgctgacccgctcctgtcgctcttgcccgcctgcagccatcacgcccggccacgagttgcccggcgggtggggcccgacccctcctgcctcgacgaccggcccgaacgcgacgacgaccatctatcaggacatctcgacggccctcaacactgtcggccaggccgcgtacagttcgtcctgcctccttcccgccaccttgacccgcaactgaccttgccttgcctccatcacactcgcagatgccgtccccgcttcgctgatcggcaagctccactctggcccggctgtcggctcgtcgcccgtccggacgacgaccaacaccgtcccacaccagcagccgtcggcccccggcgccgcgcacgcccacccgacgacgaccgaggacatcagcaacgccgtcaaggatggcgcggccggcctccaggagaatgcgaagctcgcggccgacaaggttgccgagctcggcaagacggcgtacagtaagtgctgtctttttacccgtcgctcgtcgtctgacagacttgctgactcgcctttgctggcagacgctatccctgccatgccctcgcccttcgccgtcggccactcctcgaccagcaacaccgcccctgccgccaccgaccgtgacgtcggaccgacgagcacgcccgccaagggcgcggttgccaacctgcccagcccggcctcgatcatcccgcactcgaaggacgcgacgtctggcaactcgctcgcgacgaccgagctcccgacgcttcaggacatcaaggccgaggctgtccacattgtcgacaacctcaagcacatggtcggcctcggcggcgctaccgccgtcagcgagtcgcactcgcacgaggtcgccgccgtcgacaagggacccaaggtcgatctcctctcgtcttcgcacgcgatcgctcccgtcgccggtgccaactcggtccagtcgtcggcttccgccactcgcggtgaggtaacgccgggcgaggtcaagacgacgcctctcgccggtggcggaggcctcgctgccaccatcgccgacgacgtcgccgacgccgcccgccactcgtccgctacgtctgtcggcgagtcggcgcctggcggtcgcgaggaccctcgggccggtgccggcggccttgcggcgacgattgctgacgaggtcgccgacgctgctcgccactcgtcggccacctccgtcggcggctcgaccggcaccaacgacgcggccaagggcggcctcgccgcgacgatcgcgcccgaagttgcgcgcgccgctcagcactcatcggcgacgcacccacacgagggcctcggtagctcgagcctgacgggcgagcagtcgcccctcgctggtggaggtggtctcgctgcgacgatcgcggatgacgtcgctcgtgcggccaaagagagccccgccaccagcgtcggtgcgaccggtgccaacgccgttcccgtcgctgccgagggtcaccacggccagcacggccatcagacccagggctccgctgccgagaacctccacctcggccggccggtcaacgtcgtcgctggcacgctcgctggcctcgctggcgctggcggtctcgctgctgctggcgctcaccacgcttcgtccggccacgactcgagtgagtaggctgccctcctttaacccttttgcagacgagtctgccgctgacctcagcgtcactcgcagccacagctatccctgaggcccgcgagacgtcgcactcgcccgccgctctccagcacggcaacgtcccgacctcgtctaccggcccgaccaacgtcctctcgtcggcgaccggcaccggctctacctccggccctgccgcatttggagacctttcgggtgctggcgctggtcttggtgctggcgctggtcttggcgctggagccgccgccgcctctgctggccactcggacaagtcgccctcctcggctctcgaggctgccaagacgtcgcaccgggacgacgcgccctcggcctcagttcccaaggtggtcgagtcggacggccctcacggcctcatcaagacggccgatggatcctacaagcaccggcacgagctgagcgaggtcgagctggccgagcacgaccggcagcagaagatttcgtcgacgtcgtcggccgccgtcggcaacatcggctcagccgcttcgtctggcacggccgcccaccccaagggcgttgacgccggctcgtcggtcccgccccaccgcggcattgacacggccaccgccaacaagtctgccggactcggcgcgacgacaggtagcggccacagcgcgaccccgctctcgccggccaagtcgaccgcctcggactcgagcacgactccgagcggccacaaaaagaagcagagcctctcggagaagcttaagcacgcgctccacctcgataagtgagggagctggccgctgctcctcctgtgtctgcctgccgcccctcctcttcccgcccgtctgcgcctcttttacttgcttctcttcgactgtagcttctttccgtttctcgcctgcctcatgactcccaacgctctcgcccctcgatgatcgatgacgactccctctgtctgcgctgcgtgagctgtgacggaaaagggggcatgtagaggatacgaggggcgtgaggacgaggagtgggatggtcggtcgtgagagatatcggctgctggaggggcggcggagaggagaagagaagcacgacgagcgaacggcgacagcgctcaggagacaatagcaatataggcgcccgtgacgccgtcacggtcggtgaggggcgtcaggtgcctgcagccagacgagaccggtcagttgggggccttcgaaaccggcgagcagcgcgaacaacactcacagcgcgacccgcttcagcccctcgccctccttagcctcgcgcgtcttcttgccgatgccgagcgtgtagaccgactgcggcaggacgcgcaggccgacgacgagcgaaacggcctcgctcgcgcggatcgcggcccggatcttgtcgcgcgcgcggcgggttgcgtcgcgggtgctgagctcgaggagcgagagcaggctgccgatgagaggatgatgtgaaatcagggatgagtcaagcgaggagggatcgaggcgaatacgtactcggtgtggaggatcgagcacgagaagaggtcctgcgagctgatgatcgggaggcctaccgaagcgaaagcagcgcgtcagcacgaccgagcgacaatgaggtccgacagaaagacgcactgagaaaggcgatgagcgaccgggtgacgtagaggatctcctggcccttgggccggatgacgagcagccgattgtagacgctcgagaacaggtccatctgcggctgtagcgggccgacgctgtgccagctcttttcggccggcgagagcagctggtcgtcaaccttgtcggccgggccggcgccgacgaagtgcttgagccggtcgagaatcgtctttggcggccgggcgccggcagtgctggagccgccctcgatggtcaactcgtacgacgggcctgtagccgggcaaaagaatcgtcagacgttagttgtctggtcggacgtgtcagtggcaagcagtcaacaacggaccctcgagctcctgccgggcatggcttgacagcccgccaagcggccggccgtgcttctcctgatcgcgcgcctggctcgccgcaatctcgcggtccatattgtcggcgtcgacgccctggaagtcgcgcaggtccttggcgagcatcggccggtgggcgacgagcgtcgggctgaactcgaacgtgttgagcttggggatgccctcggcagagtaggttgaggccgcgccgccgatgaggaaggagagccggcgcgacgactggaccgagcccgtgacgtcgatctgcgcgggggagcgagcctttcagcgtcgatcttggcgaggagaaagcacggtggcgacggacctgacccccgacgagatatgcgaccgtcccgtcgcgggcacggagcgggatgagcgcgagcaggttccagaacggctgcgcggaagggaaaaaaaggggtcaaggggctgcgagtctgcaaggccggaagcactcacttcgccgctcgatcggtagttgaggaggagctcggtgtgctcctcgccggcagcgatggcctggcggatgcgctgaacgctcccgggcgacgttccgggaccttggaggaagcggcagttgcggccgaggatcgcctcggcccggtagcccgtcatcttgcaaaaggcctcgctcacgaggacaatagggttgtcgcggagccggccgttggtgatgcagaagacttcgccgatgccttcgcgctcgtgcccggtcgagccgagcttgacctgcgactgctcgacgagcttgcgccggatgaaggctttgaagtgggcgtcgtacatgccgcggaggacagccttggagagggccgagaacgacgagtccatgctctgggcctggtgcgcgagaagaggggggggggggttcagcctcgcgagacatgtaggcggtacgaggtagcaggacgtacgtgcacgagctgcgtctcggagcccgggcagagccgctcgagcgcgccgtccgtcgagtcaaagtagacggctggacgagcgggtgcgcagagccggtcagcccagccatttcggatagtcgagccgtgagagggggcgcaccctggatcgcagaggcgccaccgcggaccatctttgcgatctgctcgcagagctcggcgtcccacctacatcaggcgtgcgagcgccgtcagcgcgcgcagttaagacttacagctgccagcaggacgcaccacaggtcgaggacctcctccttcccgagccccatcaggtacgccctgaaccggtgccggccgagcgggttcctcagcatctcccaaaagacgtcttcgctcagcagctggccgagcgagtggtcgaggtcgtgctggaccgccgtcgaggggagcgggaaggatgtcggagacgtgggggggatgtaggcaaggttcggaaggtgtggagggaggagcgaggtcggggcgagaggggcggagggcattgactggtagcggtcgaggtcctgcgggatcggagacggacgtcagtcgagcgctggcaagagggaacaaaaggatgtactgccatcagcccctcgcgcgatgctcctccccgctgcccaccctgcatcgccgcttcctcagcctcatcaaccgcccgctccttcgcctgctgctgccgctgctgctgcttgtcgccctccatgacgcccccgagcgggacgattgcccctcctccgacgcgctcataaacgaccctcccctcgcgctgcgcatgtgctagctcacgctcagcctccgaggacgttgagggcgacgtctcgccctcgtcggagccgggcggaaaccggcgcgcgcgtgtccgggacgagacgggcggcgaggaggcgagggtcgaagtgcttggcccgcctatcgctgccgtcgtcgtcgtcgtcgttgttgggctcgcaggcgtcgtaggtggtgtcaggggcgagacgacgcccgtcgtccgtggccgggtcatcttgcccgcgagcgagagcgggccgcctgcgctcggccgagggatgcccgatggcggcggtggcggcggcagcggcggagggcacgcacagttggtcgaggccatcctgagaatcgggcagaagccctttctggtgaggacggtgccggtgacgcacattgctgtaggagggggtgaggcggtaggttgggatgggccgagggcgctaagggcgggcttgaggatgctggagggttgagcgacggacgaagggacaggcaagcgagcggccgaaagtcagccgcgtcgaccggcagcgctttcccctagtcatgtccaaacgaacggccggaagaaagtggcgggttcggtgccggaggtcgtcgcgacgggtgcctgcgggcctagggttgggcgagaccacttgaagagagggtgagtcgggctggcctgggttgtcgagcgcaagtattctggccgcgagagggcagctcctcgaggagtgtcgaacgcagcccttccgctcgacgtgttgttcgagcggcgcggccaccggcacgagacgaagcaaagacgcgtcgcccgcccgccaagacacgcgacgacgcgaccgggccaggcccttcgaccgacgcgtccgcttcaaggcaccactgccgctgccttttgcagggtggatcctggagatggcagtgatcagtcgaggcttgcaactctgggctctcatcgggtcagcctgccgtcagcttcagctgctggtcgggcgggtcgccaggcatgacttccataaaggtcagtcagccagccgtagattgtcttaccgagcgggaaaagaggcccgatgagctgtggatggccatcctctgctcgtttttcttctgcaggcttgatcatgttggaggcgagaaagacacgggaaggcggcagacaaaagatgcgattagctggcggtcaacaggtttcggcgcgccgtcgcccagcgccgtcgccgccagccctccgtttcgccggcctccaattaaagctactctttctcaacatctaaagaggcagacattacccctctacacgaccagcccgtcgccctcatgctcggtccagagcggagggacaggcgatcatgtcgaagttcagtctcgagcgatgcaggttcatgaacgatgcactcaagagggttccgcctctccgctgcctgcctcgacggccggcccgacgagcagcctcgccctggccatcgactcgtcctccttcacagatccaccagcagcgtcgggtcgagacctccatcatcgccgccgtcctccctccagctcgctccggccgcatgtcgcttttccgctcgttcgtcgcctcgacctcggccctgccgtcgacggccgcggccgtctcctgctcgacctccctccgtggccttgcgaccgccgctcccgaggcttcgacctcgtcgtccgctctcgtgcacccaaagggcccgacagacgtcaagcatcggtggaaccgtcttgtccccaaggcgatcaaggcccgcctgccgccggccttcatcaaccagaatttggacccaaagcccgtcttcccgccgaaagcgccgctcgagacgccagcaaagttcgttggcgtcatcggccgggggatcgtcaaaaagctcaagggcaaggtcgacctcgagatgatggcctgggaggacctcatgaactggcgcagcaagcagtggtccgagaagggcggtctcgaacccaaggaccggcggcacgtccttacttccgagctcgccctctcttgcgcgtccgaacctgatcgctgcttgcacctccaggtacctgatgtggctcatcaagatgtacaagaagggcaaggacccgcgttggctggcgattgagccgaagaagcccaagaagtaccgcgcgtgcgtctgctcttcccttccgccgagctcttcagacgtcccccgggctacccctcttgctgacacttcctgcgacgttcctctgccagttggggcgacgccgtccaggacggcatccgaattcccggtgctcgcttcaagatggacctcacgcacgcccgccggccgcatggcttgcctggcttccccttccggggcttcaagcgcgagtgagcgcgccgaaagggcggcggtcgaggtcgggaggacgccggtcgctggatcacaatgtcccacccgtcacgagtaggaggctcggggagggagagcaggccggaggggacttcatacgatcgtccctgtggtcagccctcggtctagaggaactccatgcccatgccgagcgcccagcccttgctgacgccctcgcccgcgcgcgcgacgagcgggagcgtgaagccaagctcgatccggatcggcgcaaactcgtagacgacgcctgcgccgacgctgacgctcggccgcgtcagttccgtcagtgcttgcttgacgtcggccgagctcgcggcgtccttcgtaaccggagacgacatcggaagcgaagcgagcgagccggcgttgacaaacgtgtgtaccttaagtggccactcgggcttgcctggcaagggggaaaagaggcttgcaccgaccgcgtaggtgaggttgccaccaagcgagtcctctggcgaacgattcggcagagcgagtagcttgtcagcgtgtttgcaagatgaggagcaaggagccagactgacgagcatcccgcgggccgagcgcgttcatccgccagccgcgcacactcgtcgaaccgcctgagaagagccggtcgccgaaccagacgcccttggccgggtcgagcggcacaacgaggcctgtccgggccgtcaggctcgcaaactgcagcgggcgttcattggtcgagaatcagcttcgatccgcgtcacacgaagaggagaaagggaacaccgacgtgacccgacccaagggagcgcgagaacgacgtctcggtgaccgacttgaggtgctttgcatcgccgccgaggccggccacctcctgcgtcgccttcaagaacgaccctcgcgagccaaggaactgccggtcacgcgtgtcgcggaggaaggtgtggacgacggccgacttgagcgagggccctggccgggcggcctcgcggatcgagagcgaggcgctgggcgtgagcgagtggagtgagcggttgatcgcctcgtacgaaagggagtgcgagccccaggaccgcgtagtctgcgatcatggcgtcaagaaggtcagcgtaacgcagcggagccctgattgagcgcccaccagtgacgcacctcgtagctcagccggccacccttaaggccctcccagtgcgacgcgaacgttgtgttgtcgcggtcgagcgagaagccggtgagcgagagcgagtgctgaggagacgcaaacagcggagtccggagcgagacctcggtcgccgaccgcgtcttggtcccgagcgaggacgacacgctgagagtctccgcgccgccgaagacattcttgacgttgccagtgatgtactgcgaagcgcacgagggcgatcagcacagaagcagacctgagacagatctgccggtcaagtactcacggcgctaccctcgccctggccaacctccgtcccggacttgagcatcagccggccgctctccttgacgtccatgacgaggtcgaccgcgcccttctcggcgagcaagctctggggcgtctcgagccggacgtcaatctgcttgaagatgccccagggtgcgagcgcccgctgggtcgcctgcgtcaggtggagaaggtcgccgagcgtctcaggcgtcgtcgagagcgctggcttgaggagggcggcgaggaaggacgctcgcgtctggacggtgcccgtcacgcgcagggccgagagtgtcattggcgcgtcaaagttgtcctcaatctagcatggcagcagaaggaaaagatttgaggtcagcgatggcccgagctctgcggtaaacagagtacggacaagggacgacagcatgcgcgagctccgctggtactcgcccatcatccgccgctggcgctgctcgtcctgccaggccatgagctcatctgccagcaaaagaaagggctcgtcagcgctctgctgcagtcgtcgacgtcccgaacaaagtcactcaccagtcgtcaggccgacgggctcgccatcgctcgcgagcggcgagaacggcgtccggaagtccctcggcggcgtcggaggcggcacggcctgcgcgtgggacaaccagcagtcgacatcagcgatcacagcgcagagccagccgcatagagtggacgtacgtcgagcgggtccgtagctgggggcagcatgataggccggtggtgggcctagcaagaagggcgaggtcaggcagggtggctgtcgctagcccgaggttcgacggcggtcgagctcgagctcgagtccagccgacgttttcgtgtcgcccaccaccacaccgccctcgctctccacgttctggcccctgtcgacagtctgacacccttgacctctctgaacgaagtcattaacaggatcagcttgaggctaccagcaactctcagcgttgacaggacgtccggtcgactgtcgcgaggtcccctgctagcccgcctcctcccgtcccgcccgccatgccgcctgccatcgacgaggattacgtccgggccctccgtgagaaggtcaagaacagcaaaaagcgcaaggccgcagctcaggcgacgaagacgactcagccggccgaagctgagtcgtccaacgggggttccgctcgagctagcaaggcgctcaaggcgtcgagcgaagcttggccggcgggcgagaacggccagcaggccatcgcgacctcctcgtcgactctcccagcgacaacccagcagcctgctacctctgctaccccggctcggccgtccacggacgtcgagatgaccaacggcgacgacgatgacgaccgcgaagagggcgagatctcggacgaggacggacctcctccgccttcaccgccaacgccggcccagtcacccgttccgcctctgccgccgcctcctcacctgccgctgccttcgtcacacccaccggcgccccagcaaatgccgctcggcatggaggcataccaggcgcatatgctggcgatgatgcgagaggccctcgtcggcgctgaacgcttcccgccgatgagcgctcagctgcgcgaggcgattcaggacggctcaatcggccgcaaaggcaaagggaagggcaagggcaaggcgttggcaaaggcgatgccgaaggagccggagaagccggtcgaggtcaagcctgtcgtcaaggagtatgatcccgtcgcgctcggcacagcggcgctcaagagtgcgtcctctccctcgaccttgcatgtgtgtctgccactgactgtccgatctcttgtctcccttgtagtcagcgaccaggagtaccggtcaacccggattcttctcttggagctcatctcgtggggcgtcgcgccagaatactttgtatcgccgctcggcctctcgcgcgaggcgatcctcctctactttcgcgacctgcgcatccggctaccgacgaatctgccgaagggcccggcccggaagcgcaaggccaagcaggagggcgatacatcggcgacagacgctatcgggccagacgccgtcaaggaggagccggaagctggggagctcgaggaggaagaggagggcgaagtggcagaggatgacgaggtcgcgggcggtgcgagtcaccaggaggaaggcgccgtctccgacgctgaggcgagcgcttctgtgaagcctggccaaggtcagtcgattgcttcgtccgcctccacttcctctcgacggccgtctgctctctgacgctttttgcttgccgatgcgcgctctcgtctcacgccgcaaaggcgaggccccagcatctgcgagccagtctcagccttcacttctgagtcaactgtcgagtcaagtgccggacggcaacagtgagcgttcccagtcccaaaactccttcttctttggaccggctgacgcctgccgatcccatcccaagcgatcccgactgtcaagagcaaacgagacgctgcagccccgaaacctcctcctgcgaccgagaccgtgttgcagtcatctctctcgcctcatgccgttttccagcaacaggcggcgttcgcggccgcttaccctcagatgtacccggcgcccttctttggcgctcagccgtactttgacccctcgagcggcttctacagtgccttcaatgcggccgcgctgggctaccagccgcagcagcagttcctccaagcttggccgcctcagatccagcaaccccagcagccgacgcccgacaccagccctcctctgccgccgccaccgccaccgccgcaagtttcgccacctcccccgcccaacagccctcctcccgctctacctcccaacccggcaccgccactcgacctctcgaccgagctgcctgttgtggctgccgcccaccctgcgccgccgatggtcgacgctgcccctgctatcgtctacacgtcttccagcacacgcctcgtccgcaagcttccggccaagcggccctcggcccttgacctcgaccagccggcgaccgcctcgacgctctcgcccgcgtccgatcaagctgcagcgtacgtcccgttctttagctccgaccgcctcgccatgcgccagctcgtcgcagaccctcctcggcgactcgtcatcgatatctcggacgacgagggcgactcggccgacaacgaccagcctccggccgacacgcgaacgaagctatcgacgctcgccccgaccgtccgtgccaagtcgtcgacgccctcgtccgactcgcttcaagcttacgagtctgagatccagcgcatgacgaccatcatcgcggcgatggagaagaagcagaaggctcggtcgccctcggctcagccgacctcgaaggcggcctcgcccgtcttgtcgaccttggcaacgcctctccctgagctcccctcctcttcttccaccctctccgtttcttctgtgccgacgacaccttccgtacccgtcgcgctcgacgcaaagggtggggaagtatgaatcatgatgaatttccctcaaacaaagatgatgatgggggagccaagagagtgaggatgcagagagagatcgtgtcatgagccctgagcgaacgcggtcgcgttcggggctggagcgaagccgccgtagaccttcgtgtgcgagtctacggtcggcgacagcgaccagcgcgtcagggtagccgcagcctgttcgggtagcgacggggtcgccggcggaccaggcgcagcgaccgcggtcagagcggcatatgccgaggccgtgcttgatggctgaggatcgtgcatggccgtcgccgacgaggcgcttccctcggaggcaggcgtcgagtcgagggcgagcctggcggcggcaggaacgacgtcgccgctcggggagtaggatgtccgacgtgaggcgaccatcggctcgggctgcagctggcctgcgccgccggcgtacagaggcggcgccgagattgcgacgggcggcccgccctggcccttgtgtcgcgcgtacgattgctcgagcgcgtcggcctgggcgtagcactcttcgtaagatgtgccgtattgccggagaccggcgatgcagccctcgacctcggtcatgccgtagcgcgcgaggaaggtgccggcctcgaggatgggatagtgcaagacgttagggtcgagccgaagatagccgttggtcgtcaggacgaccgcctgaagacgcagcgagaggggtcagagtcagcgtcgcctcgtgatctacatcgacgagctggcacgcacgagagctgagatccgagtggcagcgtgtgcagcctcctggctgagctgcgagcggaccgagtcgatccgagcgacgagctcaggcgctggctccgctcggccggcagcaatctccttcgcctcgaggatgtcaaaatcgacgagcgcacggtggagcgtgagccacatgctgttgtcgttgaaaagagcgattgaggaagtgggtcagcgaggaagcaggtctgtattgagcgacgaacgaaggacgcacacgtgaaaattggagtcagcggcgcaggcggtgacggcgtggacaaagtcccaggacgacggccactgattcgggacggcgaccgtgctcaggtggacgtcgcgccagccgcagaggaggttgacgagctgctgcagagcggcgagcgggatgccggcgctctcgacccggggcgtccaaagccggctgcacgcctcgcgcgcaatcttggccaggtcgtgggccgagatgtaccacttcttgtactgcaggcaggcgggagcaaaggagacggacggtcagcgctggacgaggcggtgcagttccccgccgacggcagacgaacctcgtccggattgtcgaccggctggtagtgctcgccatcccaagcggccggcggctcattgtcgtagtcgtcgtcgcagaggactggcttctggcgccaaaagagggcgcccatcgagtcgctcaggcaggcgagccaccacgcaaagaggagcgccccccgccggagctcgtcctcgaccgcgaggatcgtctgcatgtggttgcagcggagctcgagcaggtgccggatcgcgaccgtcgtccagaagcctttggagtgcgacgtcacgttgcggccgacaatcgactcggccggcttggctagagacgagccgacataccgagagaacgctaggacccgagtcagcgcgcagttccagatgtcgcagaaaagccgaacgagacacaaactcacggttgaggaggccctccatcagcagcgcagcctggatgttctcgagcgtcggcgtccggtaagcccgattgacctcgagcacctgctgggcgcgtgccacaagcagccggacgagccggctcgtgctttcgcggatgacaccggttccaccggctgacgtctgctctcggtccatcgcaatcgttgggtgctcggagaacttggcgccgagggcgaggatgacggcgagcttgacgtgcgaggccgtcgaggccgcaaatttagccttgaagatgctctgcgcgatcaagggcatccggatgtggacgatctgaggagagacgggaggtcagctggacaatcaggcgatgtgagagcacgagtacgacgcgcctggaagtaactttcgatcaggtcgttggcgagctccatccggagaccctcgctaagcaaactccggtgggccgggctcggtgggctgtcaaagagctcacgcttgccgcccgcgtggcccacgagagtctggtcggtgtagccgagctcgggcgtggcgacctcggtcggcgagaagaggtaggcgagcagcgaggccatcggtggtgggaaggcggcaagcggcggactggagccggcgatggccgagtggacaggtggtggcggcagggatgagacggccggctgggctggagcgatgttggacgtctgacggtagagctgctgcggctgctgcggcggcggcggctgctgaggcggcccgacaggttggccgtacgccggatgttgctgcggtggcagcaggtatgacgacggacctgcctgctgctgccgctgctgctgctgctggaggtagcgcgggccggtcgaaggccccgcgccagggtgcggcagagggagcggcatctggtcgatgccgaccgggaagggaagcggatgctgatgctgatgcccgcctccgacggcgttgctgaccgagccgccgtagccttgcgccgagttgccattcgcgccgggatagtgcagcgccggcggcagaaagggctgataggccggctgatgggagacatgcgagctgacgaccggcggcaggatcgacgaggacgcgaccgaggacgacgacgggccagcggccgagctgtacgacccgtcgtactcgtgacggccgccgtagctcgacgacgagctgccgtccgtcgccatcggcagccgctcgtccgagaccttgcgccgcttggcgaggccagcgccagggatgtcgagtccgcctgcgccggtgccgttcttggtacgcgctgcccgctcgttgttcgccttgcggcgctccttgttctggagcgaggtcacatagtggttgctaggagggcgtcgaagaagagggcaaaggcaatgtcaattaacacagtcgtcaagagcaaatttcagtagggttggacgtacgtgcagacgagcgtcttctgcaggcacgagtcgcactgcagagatgagagcaaggccagtcagcatcgacaacgaggacgcaggccggaacccggctctcagcccttccggaccagtcagactcggccgtcgtcgttagacggaggggaaggcgtttccgcacaggagccgagcggttgcgcaacccgcccatctgccaaggatagagagaccgcggccgcagctaccggccccgaggcaaggcgtgaagagggttggcggcgaccggagccgcagtcgccaggcaagatgggcaaagagagatccggccacaccttttctgagccgttggtccgcaggcacttgaccttgcgcgagcgacaaggatcgcaggcctggcgatgggggaagagatcggcagcgagggtttcgggcagattgattggtgattgggcggcgacgggagcaagtcggcgaggagaaaggaaggagggaaagatgcgatcagcaaaggggctctggaaccggccgatggtctgatgagcgagcgcccggtctgccctcgcctggcgtaccgacgaccacgcagtcggaaggcagtcgaattcgcgcagcggaggcagaggagccgacgacgacgagaagaggagagaggttggatggaagagggcgaccaggagccgcccgccatcgggcccggcaaccgtcgctacagacgccgtcgaggggtgccgcaaacaacggcgtcgaccaggaaaggagccggggcggcgcgaggagaaaagccagcagagggacgcacgacgttctgcttgcgagccggctggttgccgccttgctgttgttgctgcagctggagctggtgctgcatctggtgctggtgctgctgctggagatgctggccgcccggcggcgagtcgtgcttggccttcttagcaaagggccctccctgcgacgggaccggcggcggcggcggcaagcgatcgagagcagcctccacccggccgtcggtgctgctgtcgtcgtccgagagctcgtcgccctcgtcgtcgtcgtcgtcgtccgaggcgaggtgagagccgaggctgctcgaggtcgagaccgagcgcgatctccggcgcgccggacggtgagagggagccgaggtggtcgtcaaaggaggcgcggcggccgacgagcccgccgccggatgcgagccagagccggcgacgacgccggcggcggtgggtggcagcgagcctggaggcggggcgatcccgaccgaggagacgggcaccgccggcgctggactcatagttggctgtgggatggtagttcgtgtaggtccgggagccgagaggaagagaggaggatggccgtcaggaggggcaggcgagacgaaggaagggcgagggagcaaagcgtgtgtgcggcgggcgcggcgagaccgacggccggggtcgggcccgcgtgagcgaacagaggcctcgcccctttcacaccacgcactctcacgtctgtaaacttcccgtaggccggtctctgtcgtcgttccggctcggagccagcccggctgtcgggctttgcctctgctgcgatcgcaaacttctcccctcgtcgattgcacagccgccgtctccgccctgctctttctcctcccgtcccacttgccgcctgctgttgctcggcagattggccacacagacttcacatcgtcggtcttgaagcccgcccgctgcttgctgctggtcgagaaagagagactgtcactctgctgctaaagagaggaaaaaagggcgaccgcggccgcaggacccgatgacgctttcgcccccgcctcgtttgccccgctgaccgcctcgagcatgttccacggagccaaccaagacccaccccaccgctgacaagcgttttgactttggtttcgtggaacgacggcccgcgggaagtggtcctgctgaacggcggaggaggtcggccgacctcctgcttctcgctcctgctgctctgctcccttgctcgctcgcatcccgtccccgccgagcccgagctctcactgatgagcgagcgagctgacgccgtcggagctgaaccatcagtctcctcctcccatgggcttgcaaagggcgagcgtccttcgccgagacggcggcgaaaactgtccgcgacaggcccggctcccggcgaagagcacgagccggcagccggacgccccttcgctcccgacaagagaagccgcggcctccttgtccccctcgagcacagcacaggcagcagccgtggatctgcctcctcccccgtctatgacacctcctgcgagcctacagcggccgaagcgcgcgacgaccggaagccgagggcctcgtcgttccctccctgcgtccgcgaccacctcgtgtggggagagactctccatgaccactgcagctctaccagcgtgctggggccgatccatgactgagggcgagatgttgttcggggttcgaccctcgcagggacgtcgacaggcctgccttcgctggctgctgcttgctagtgtgaccggccgtcgagcgaagtaaagtcaaagtggtcgtgtgcatcgcataagtagaagcgagacaaggcgggaagtatgagaggcgggccgtcacagggatcggaggaaaggtacgggctagtagagctagcaggaagatgggcgtagcgggcaaacgtcagagggcgtcaaacaaggaaaaggtcgggcaagcggcggtaggtcgtaagagcgtgaaaaggtagagaaaggcgaggagctggtaggtgacgcgaagggatgggcccccaagggcccgacctcccccgccgccggcgaagacaatgctgccgccccggagggcgatgctgcggagacaacctcgcccggcgtgccagaacaggacgacgtcgagtacgagtcgctctcagaggatgacgactcggatgacgaagacgatgacgatggcggcgaggcggacgtcggcggcgcagacgatagacggtcgtcggtcgacggcgacgactcgggcgacgaagccgggtctgatgatctgccgacgccagagggcaacggccggggcaacggcaaccgcgtgccgtcgcaagaggtccacctggcgagcggtctgaccctcgtctgctgggagatgactccgtacgtcccgcccccctctgcgtcggcctgtcgacgcgcctgctgacccaaaatctctctctctctgcaggaagctcgccctggtcggcatcattcgcaccgagcattacagggcttaccggccgcggatcgacgacggcgttgacgcggtccgccgggcggtccgtcagtacgttctgctggcgcacggccgcctcagccgatgacgcgcgagtgaaggtggaggaggaaagggaggagttggaagcgttgtacacccgacccatgcgctgtatcctgtcgacgaggtcctccgaacgctgagctgatcaaggagcagaagggtcgttgtgcaggcaagatgcgacagcgtctctctccatctcctcctgcgggcagagcaggaacctctgtcgctgctgcgcgcggcgagactcaggatttcgagcagcagggcagctcgtcgtcttgcctctgtcgacccagctgcacctctcaccttcaaactcagcctgcctagccgacgctcgtatctccttgacctccatctcaaccgtcgccagctgagctgagcgaaatcgtataagagcgggatgtccgagttcaaggtcccagccctgcctgccccctccgccgcggctgaggccgccgccggcagctcgagctcgggcgcttccctgccgcaggacctggcgatgatcctcgagctcatgggtccgccctcgacgagcccggctgtgatcaaggagtcggccgaggatgtcatcgcccggatcgaagcagggcggcagggcaaggcggcctcaacgacaaccgacgctgctgcggttgacgacgagcccgaggagggcgaggtcgcgcaagctgtcgtcaaggtcgagaaggccgaggagagcgagtgagtctgacgacgggaaggccgtgtgcttttcaagagctgacccttccttcatcgcccgccgccgcagctccgacagctccgactcgtcgtccgagtccgactcgtcctcgtcgtcctctgtctcgagtgcttcgcgctcggtcggcgccggaccgtcagctgccatcgtcgcctcgcacagccgcaacgctaaagccgtcacccgcctgacgcgtgaggactcgccagccgactcggagcccgatctcaaccctgacttcttcaagtcgacgaacgagctcccggcgccgacgactgcgcctccgctgccgttcgagcggatccccgcgggccaaggctcaaaggagctcggccagatcaagagcgtcgtcggcaagctgatgatcatcgaacaccgtgctgaaggtctcggtcggggccagagctcggatgacatccttggcgagggcaccgtcgtctgctggaaggacggccgcgtgctgggcgtcgtgcgtccttgatccagaccaggaaggcccaccaaccggcgctgacatcctcactgaactctgctgcaggtcaacgacacgttcggccctctcacagcgcccatgtacactctcatcctgcccgatccgttcgcgccgtcgaccgctccggccgaggacgacgtcgatgctgcgcagccagagacttctgccgcgaaggctctggagaatgttccgagcgtcgtttcgccaagcgacgtcgaggcggaagggtcctcagctggcggattggccgtcgaagcctcaccgacagaagcctccgtcgaagcgaatcgcgctgccgacggcgtcaccgacctttcggctccatctccggccaaggaggatgacctcgaggtcgaggccctcgtccaggccgatgccgagctgccttccgggagcctcgattcacccatgccagtctcacccctgccggcgacctttgaccttccggcatcgcctcccgcgccgcatcgaccgctgccgccggcctttccgaaggctcagcttgtcggcctcaccgtcttctacccggtccagctgtcgaatcgcgtgccggtcgcgcagctcaagcgccaacgctggacggacgccagcaacaagtttgacgaggagtgcggcgaggaggagatggactggtcggacgacgaggcagaggcggccgcaaagcggcggaaaaagctgaggtgcgttgaatcgggcacgctgtcatattctcacctgcctctgacctccctttctctcccgacgcgcagtcgcggctccaaggctggctccgtccgaggcggatcacccacgccatcgatgggctcgcagtggggcggctctcatttcgacgccaactcggacgacgagggaaccgtcctcaactactctgccgttgccgagatggcgggcgcggcctctttgccgaagcggccgatgcccgtagcttacgacgacctcgacgcatccgagtaccgcggcgagagctcgaacggtggcgccaacggggcgactcgcggtgggaagcaacgcgagcggggcggtgctgcacgcggaaagggcaaggaccgtgccaacgacggactctcatcgcgtggcggcttcgagtcgtcgcgcggcggcggcggccgaggtggtgcccgcggtggcgtcaggggcggctttgacgctggccgtggcatcgcacggccgcgaggacgtggcggcgcaatgggctctccgcacaacccgcattcgtcgtacgagtcgcaacagcagcaacagcagccgcgctcggtccctgcggctcctcctcctccggcccgccccctgtcgccgacctcgatggctattgcccgggcaacaggccaatatccctctggtggacaggcgcctcccggtgcagctggccctggcccgcctcaagggatgccgttccccgtccggccgtacttcccgcaggccggtttcccctatccgttgccctacggccagctaatgggcccttacggacagttgcctccaggcggccaacagacacagcagccgcaacagcagtcacaacaacagccgcagcatgcgtttggcggacccgccccgggctcccacatgccgtacggccagccgccgtacggctacccgggcatctacggcgcatcgcacggccagatggcgcccggtcaaccgcagcacaatccggcgctccaacaggcgctccaacagcagcaagccgagcacaacaagcagctgctcgagatgcagcgccagattgccctcctcagccgaaagcaggttggcggcgccgcgacccctggaggagctggaccgggcgaggctcagcagtaggcttgggttgctagcgtgcgatcaaggacgcaagtcatgccaccgactgtctacaccaaatatcacatgcagagcccttatcgagagcgagaagcatgaaagaaaggcgagcacgggctggtctggggcgagtctggcacgaaaaagaggtacaacgtgtcgggtcggattcggtaaatggttacaatggagaagaggctgtagaatggcgagagcggatgggagggcgagtagtcgagacgatggcgagatgccgatcaggcggtgtgcttcttgacgtcgtcttcgttcggcccgtcggggcctgtgtgatcgaaggggggtcgcacgtcaggtctgcgttctcgtatcacctgaacgtaccttgtcactcgagagcacgcactggatgacccggcgaggttgcactgatggaagcagcggacctcgtccggcttgaaggcgccgacgaccgagtggaggacgccgcggttgtggaagaggaccatgtcgtttgcgtcccagtctggcgaagcaagcgcgagcgcgtcagagatcgcacagacgcagaacaggaagggcgcttgacataccgtgcgggtagacgaatgccgggtcaatcgctggccgctgtaggccataaacgattcgccgcacctcggcgaggtcatcgatcgtcgcgccgtcggggaagagcgcgtcggccggtcgagcggcatccgtcggcagcggagcaacatcaagaactgcgacggctgaggggtggatctggaggtggaggccgccggtgacggggttcttccagagctgtaggcgttgaaggccggcagttagcgtcatgaacgcccgagagcagagatgaagagagccgtaccgcgggcagaactttgaccttgtcctccgtccacgccggcagctcagacaagggcagctcccgaccttccgtctcgagcccgaggccgaccgagttggaccgggcggacgacatccagacgtatgggtggggcgcctgcagagcccgacttgtcagtctccgtgtgcctgcgagttcgaaaccgctccgcgagcagaactcacgtagcggaccgtcatccggacgacgagcgacttctcggccggtgacagtcggtcgaacatagtcgcgcccgagacaaaggcggtcgtgccgagcgggaccgtgagctcttcgcccgagccgtcgtcgtctgcagcgagagcgaaaggcctcggggatcagccgaagatcgtagtcgaggcgggacgatctcacaagagaacgcacagcggaccgtctgcttcctaccctttggcacatcgagcgcatacagcgccgtcaccttgggcgggttcaggtcgtacagcgcagcgtcaatgtgccagcggtagaaacgcgtctgccgcgagtcgaggtgaaggacaactggtcagccacagtgtaaggaaggctgcgcaggggcagaacggacgatgccgttagcctcttcctcgtccgagacgaccgtcttgtggaacgtcttgtggtgcgggtgcttgagcttggcctcctgccggacgcaggaaacgcgcagcagcagcagcaatcgtcagtcgcttggcctccacaaaggggcagccaaagccgacgcacagcgagtccctcatggttgtagatggtcccgttgccgatcacctggacctgggggacgcgtgggatcgtcttgaggtctgggtgaaggatcgacttgctctggccggccgtcttgttgttgccgtggccgtagctctgacccgggattacaaaggagattgtcagctgcaaggcctagacaggggatgaaaccgaaggaagcaataggaggagaggccgacctcggatgttgggtcaaaagactgaaggagggcccgagacacgtcgtcgggagggagggactgtcagccgacgtcctcgaagcgaagcttggtcggttggcccgcagcagccctcccgggcgagcgaacaagaaggcaggcctgcccacgcactttggtgagcttgtactgggcttcagggctgacgttctggtccttaaagagcaggcacgagtgctagaaggggccaggtgagacggtcagcgagacgagcgatgacatgagcgggtcagggagtaccgccgccgcgcaccttgtaaaggagctcccggatctgtcggccaccgagatcgcatccagtcagcagctgaggaggcaagagacgggagatgaacgaacctgagcgagcgtcgcgtcgtcggccgtctcgaggtcgacgccgtcgacacgccggccaaaggtcgcgaagtgcgccgggtcggccgagggcgggagcggaaggggcgagagcgagagctgcgacggctgctgggtagcggcggccgcctgcggcgcaggagagaaggtcgtccgggggacgggcgatgagagctggactggatgggtgggtgagatgagcatggtgggatgatgggcgttgagggcaaggcgagcgaagaagcctctttaagctacaacccttatcggtcggccgggttcgaggctgcggcctgctgcgcgtcggctcctccgccacctccggctgccggaccaagggcctcctccggtcagccgggcagcatggcagtttacggcgcatgcagcttttgaacatcgcgggcaagcgatgggcgataagagcttgctacgaggcggtcgaaggtcgagctgcctgcacaggccgacaacggccgcagcgcctggcgcgacctcgttcgtgagctcagcctctcatgcttgatcgcctctcgctcaccctcgttcagcacacccgactggctttactcgtctcatcaggtgtgccgcttggaaactgcgaatggagttgagccgccggtgagctgactgctggactgtcgcctctcgtcgaccctagcctagcccggccagctccaatctcacccgcctccccttcgaccgcctcctcgagcccgtcatcagccatgcctgacccagcagcaagcagcacgaatgcctcaaacgcactcgcctcaggaggagtcgccgtcatcaccggtgccgcgtgagtggactcgctccagctgtcggtcgcgcttgccaagccgctaacgcaccttgccctggccttgctcaacgcgccagctctgggtgagatcagctcgcagatctcagatgcttcgcttgtctgactcccgacgcttcccttgacctgctgacttactccagcatcggtctcgctgccgctcacgccctcgccgagcgcggtctccgcctcgcactctgcgacgtcgacctcgctcagctccgcgcagcgaccaaagagcttcaggctaagcttggcgacgagcgcttccttctccaacaggccgacgtcagcgacatggcgcaggtagaggcgttccggtacgttgcgttactctgcgcttgtggtagcgccctttgctgacctgtgattccattctgctatgcgccctgaacagtgacgcggtgctcgcccgctttggctcggtcaacgtccttatgctcaacgccgccatctcgcgcggcgggtcaaccttcgccagtgaccaaggcgctgggactgcgctgttggccgactggcgcaggctgcttgacgtcaacctctttggcgtcgtcaatggcacgcaggcgttcgtgcccgcttgtgagtacctgcctgaaggcttgcacgttggtgtctcgtctgacgcatgcttccgacggcccaacagtgatcaagcagaaggatccctcggtcgtcgttgtcaccggctcgaaacaaggcttcacttgcccgccgtcggtcctcctgtgcgagcgagccgcctgactcgtcactgacattacttacgctccccgcagaggcaacgccgcgtacaacgtctcgaaggtgcctccttctctcccatcagaagacggtctcgaaggcctcagtgctaaccactgggcttgcacctctcactcctctgcggcaggcggccgtcaagtgcttgacggagcagctggcacacgagctccggcagaagggcgccaactgctcggcccatctcttcgtgccaggtgcgtcgcggtgcttcaagcgctctttgctgcagctgctgatcattccattgctcccgtgcaggctggacgcacaccgggttcgctcgacattgaaccgacatctcaccgtcgtttggctgaccttttgctacgcgcgactcgtagaatgacgaatggcggcgacatgagccgagagaagccgtccggcgcctggtcagccgaacagacaatcgcctttatgctcgaccgcctcgccgccggtcactttgtgcgtcgctccgcccgcctgcccgagggccgaaaccagcaacgtccgcgctgacctcataacgtaacgacagtacatccttgtgcccgacaacgagacgaccgaggcgctcgaccggctccggatcgcctggagcgcggccgacccggtcgaaggcaggccggcgctctcgcgctggcacccagagtataagcctgcgttcgaggcctacgtccgcgaggggctcgatcgaggagagggtaagtaagggtctcgggtcagcatgcgtttctcgcgaggcagtcagtcggtcagcgaccgctctgatcgcccatcccccttctctgtctcttgctaccgagtctgcacagcatgagcacatggtccgagatcgcagcatgagcagatgggagggcgctatgggcagaggcctcgagggcagagaatggacgaaaggcaagatcgtggtcgtgactgcgtgatggagacgatagacgcgtcaacggcgagaaacgcagcagagcgctagacggacatacaaagtcgtgttggtgatacaggttgtctcgagttccgattaggaggcgtcaaggcacgccagcagcggccgcagcctccttccgctcgagcgcgacccgctcgaggccgccgacgaagccgaggatcgcccgctcacgctcgtcctccctcgcactggcatcgaccaggccgccgtcgtcctgccgaccggggtgcgaggggagagcggcgattgtgatgcttgcgctgcgtgagcggccgccggcgtgggcgacgggcgtcgcggtcccggagtaaggcggcgtcggggggtggaaggcgatccggctgtggccatcagtcgcattctcgtcatcgtcgccgtcgctctcgtcctcagacgaagcggactccgattccgaagccgactcggactcggaggccgacgacgagccctcctggcccgaagacgacgtgaaatcctcgtcggtgtaggagctcgcctcggacggcggcggcgagcggtgcttgacgggcgcaggtgacggcggccggctcttgcggacaacgacgatgacgtcgtcggcctcggtcttgtcgttggctggagcgtccgagggcagaccgacgacgtggccctgtccgtcggcagccgacgcccgacgagaggcggcaggcgaggttctggccataggcgaggtgacgccgcccattggtgtgcttgtcccacccgtcgtcgacgtcggcgagacctgtccggcggggctgaccgatcggtttcggccttggcgaccgaaacgcaggaggccgccgcccttcttctcgccgcccgcggggggcaactcgccgctgtcgtgcaggccagcggcgtgggcccgattcgaagctacagcagcagcatgagacgctgccgctgcttccgccgccgccgccgacgactcggccgagctgctcgcactcgacacgctcgaggccgagctcagtgaccggagcttcttgagcatcttgcgcccgccctggaggacaaacgtccctaggtcgggcacctcgctcgagccctgtacaccgtttgtagcagcccggtcggcttgctcgtactgcgccttgtaggcctcccactcgtcgtcggtcatcgcgacccactggacgccgttgccgctcccgtgaggcttgctgccgccagagccctgcgagtggagaagcgcgctccgtgaggcgacgccgagcgagatcgagtgccggcgctcgggcgcaggtgggagaggcgcaaagtggatctttgaagggcacatagcagtagcggcaggcgtcgccgtgccagtgctgccatcggctggcgccgaagggggccaaggttcgccgtcgctgctggcgtcggtcgggccgctcggtaccgctggagctgcgaacgctgccgttgatggcgcagcggccgtcgcgccctgcatcttgttcaggaggatgccgccctttgacgctgcgccagcaggagcatggtcgccagcgactccggttcctcccgacgacgagccttggcgcgagagggcggccgacgtggggagcgaggccgacgttgacgtcgtcgaggtcgacgagtcgagacgaggaagcgagggaagagagggcttcgcagggctcgaggcgagatcgacggccatcctgaacggagagacggtcggtcgacggcggaggagcgagctgaagcccatcgcggaggagggagggtcaacgcgcgcgcaggcgaggaggtcgctaacggcagagggacggacctcttttactttcaaagcggcggcaggccaagctgctcgcagagagatcggatcggaccggccggagcgatgagctcgagacgccttctgggccgaaaggaagctcgtcgggcttggcaagctcgtcgggcgacggcgagcgaagaaggaggggcggacgacgaccggcggggactcctcgtttcgagctgctgctgctgctgctgctgctgggctgggccgctgggtcgcctctgggctcgagctcaactaagaacctccttaaagagtgcgggctggacggctagaggagaatcgctgtctaggagcaggtgacgggggtcatgggcagaggcgaagaaagggaggacgctacaggcagcagcgcttgtggccggctcggcggcgtgcgacgcgccagggcagagagcagcagcatgtcgctcgacccgtcctgtcgtccgaccacatcctccttccagacagcctgtctcctccttgagccaacgcgtcgtcgttcatcgggaccgtcatctctcgcccaaagcagtctcatccacctgtccagctccgacaccgcgcccgactcgccctcgaccagcccgctcagcccctccctccaacccctccctcgaccacgccatggcattcccccaccaaaagccccggtcacggaccggcctccggctccagatctggcgctggcgagccttcgtcgaggcgacgtttggtctcggtatgatggatccttgggaggtcatcatcatttgtcggtcccgcttcttattctccctgacagcacgcgtcaggctgttgacacgtcccttttgctgcccgcccgcccgcagacctgacggtcctcctctcgctcatcctgctcgcctacaccatcttcttctacctcccgcaacacatcaacttcctccggcgacgcgcggccttctacgcgctcggcgacgagtcgggcgtcctgctcgggtcggacgggatcgagctcgtgggccgttggctcaagacgctcggcgccggcagccctgcgacgagggatgtgctggtggagggagcagaggaggtcgggaaggaggcggcggcggaggtgattggggagcttgcgggcgcgcacaaggcggcggcggcggcactcgcagcgacgacggccgaggcgctcaggagcgcaggggagctctgaggccggctcggcccgtccctggttcctcggtcgactatccggctggtcaagaatgagcacgtctagacgcccgcctgccggtccgcggccgccctcgttgcacaatgcagccagccgacagactggggctcgggcggcaacctccatctaattctacacctaatcagaggcctccgacggctgcctctccgctctgcgacacctaccgccctctcgccttcgcaggaaggatggtcaaggtcaatcgaggcttcagctagtcagctcacggtcgagtcggctcgaccagctggctggtgaccggtggagggtgctcgcacccggagagaacatggcccctttgcaaacgacgaagctgccatccggcttgccaaggcgaccaatgctgatcgacagagccgtcacaacggggctcgctgacgcaactcacccaacctgtccgtcaaaccgccgggccgtcacagcgcacaaccagccgcagcggccggcccaacagcggcaggtccaagatcgtcccgacgcgagcgaggcactcgtcgagcggacgtccatcatggacgccactgtatggttggttgacgcgcctgctttggcaggagactgtcggccggacgggtcagccgcatgctcgacggccctcgcgcacagcaggctgaaaggtcagtcacgtcgcgtcgaccggcaaagcgaacatgaatgacgaccatcaagcgctttcctgctacttcggccgctgtctgtgcgaacgacgggtcctgacggcgctggatcgccacacgttcacccgcccctctccctcgctgccataagtatgaaagaccctcccctcttcggctctctcccgacgcgcgtgtccttgaacccggttctttttacgtacatgcctcctgccaaaacggggtcctccgtcggcggggcattgcgcggatccgcagcagcccacgccgcaggggatcaacaccgcccgggcgcgcgccctatgtcgccgtccggggccagcttccctccctctcctctcctcttcacctcgaccccctcattacttccctcctgctcttctctccttccgcctctcgcttctcgccgtctctcctctcttccttgatggccgaccgcccgcgcccgcctcctgcgccaccaccgccgtcgttctcggcaccgccgcagggcgcgcctcgccgagcgtcatcgacaggcgccgccgtcgacgcctcctcccttcgagacggcagctcgaccctacccagcatcagcagcggcaacatctcaccccgctcgaccgctgcccggccgtccatcatttctccaggcccgccagcgatgcgcggcgtccaccagtcgtccggcagcagcagctcgcgctcgtcctcgtcggccgcgtcgtccgactactgggacgagtctgacagcgccaacgaccgtcgctcacggcggctcagcgcgcccgaaggtagcagcagccatggcggcttccggaggacatcaacagcgacgagtgcgacgagtgcgagctcgtcagacgacgacaacgaggcgcacgacggccggccgggaggaggagcccccccacacttcgttcgccgtcggttggcccccccgcccgctcttgaccaactgacctgcctctccttgtgcgctgctcacccagcttcatcagcgacctccaagccggcatcttcgccgtaggcacctacgcccccaacgcccagccgacctcaccctccaacctcaaactccaccacctcacttcgctccgctcgccctcgagcgcccgcccgctcccggacctcgagctcgacggcgacgggacgtttctcgacctcgcgcttgatccagcgcaggatctcatcgtcctcgtccgacgtgccctctcgcgcccgacttcgctccgcgaggtcctcgagccgccaggcagcagagcgtcgtacgagctgctcctcttcgacatgactggccggccgaaacggggcgttgccgtcgagaggcttgagatggacgtcaggacgctctaccctccgatcgcggccagtgcgtttccgatgaaggacgcgaggccgctgctacacatcctcggcgacacgctcgccatcatggtgagccccccccccctcctcctcctccttgaccgaccggcgctgactcggctgtgcacttggctcgaaggtcggcgagaccgacacgatggagcgtgactgtatctttgcttggaactggcggaccggcgagctgctctgcgtccgtcccccttccctccatctttcctgctccctgcaactgcatcctgattgaccccttctcccttcccccacgaacccgccgacgctccttcaggaatacttctacgagcggccctcggtcctcgtcagcttctgcctcctgacgccgctctcgttcctcctgaccggcttcgacctcaagtcttcgacacccaacgtcacgctctacgccttcccctcggccttcgccagccgcgacctcctcgaccactcgccgacccagccctggccggtgcgagtgtttgagctcccgcgcttgaagaaagagtgcttccatacgtcggtcgtctgtttggacgtccggtccgagacggccgtcagtaccggcccgaagatctacggccggccggaggaaggcgatgaggaggagcggctgtttgcggcggacccgaggaaggggatggtcgtcgtcgatctcgaggctggccggcgactcttccacgtgcgcggctgcgtttcgcctggttatgaggagttgcgagggtacccgtcgctgaccctgacgtccctccctacacgccaggcccacttcctccgctcgagcctgattgatcagctcgaccgcgcgctcgccaagccgccgaccttcctccgccgaagtagctgggcccactggggcagcacctactgccactttgccgaggccgccgtcgagcgcgcgtgcgtcaacttcagccacggcttccgcgtcgtcgtcagcgagcccatcccaccgaccgccgcgaccgaggccgacccaaacccttcaccggcagcagcagaccggcgctggatcgtcctctccgactttaaccccctccgtctcacgagcgcgccgacgacgactcggccagacgacggcgaggtcgacaaccactcgtggacgctccacgactttccgaccgtcgtcgcgccgggcgacgtctttcgcacgccggtcgagagccgcctcccgcgccggacgagggtcctgggcggcgacgaggggaagggcatgccgtgcgaggccgtcatggtcgacgaggagaggctgatcgtttgctcgcccgcgaccgaggttaggccttcctccccgtcgccttcacacctcgttctgtccactgacatgctcctcgccgccgcccgtcatcagaccgagccgcggacgttccacatcatggcgatgtgagctgtcgaatgcagcgctccgctggctggcggccgagaagaacaggtcatctagcgcccgagtcgggtcgagccgatcgcgctgagcagcctcagcaggtctcgatcctcgccatcgtcgacatcgtcgtcgttatcgagccccgcaccgcgcctattgcttaaggctcgctcgtcgccggccacgtcgtcccagccaccggcctcacgctcgtcctcggtgttttcctcctggaggacaggagcttgcctcgagcgtgctatcgagcgtgctatcgacggatgcttgccgctacctccgccaacgccgctgctgcgagcgacgagaccgggcgatggttggccgttcaaaggtgaaccgccgacgccgcccggccgcagaccgccgaacgaagggacattgtgctcggccaggtagaaagacgcctgcattgcgccctcacggggtgaggggtgctgcgtcggccggtgcggcggacggccgtgcgacgatgcctgctgctcctggaggcgcgagaggaagatggacgaggtcgggtcctggacggtccagctaggattgttggcctggtgagcgggaagggtgctcagcggtcgtcagccacgttcgtgcagctaggcctcgcgcaacgacgcaccttgaagttgaggaaggagcgctccatcttgccgcctgccggctcccgctcgcgcatccggtcgagcttggccgcatgactgtctggccggcgccggtctgccgttgttgacgcttcgtccgcgcggcccttgccctttccgacgcggccaaagtcaaagacggcgaggctgcagacgtagccgaccccttcgacctggatcgtgaactcgcggaaaaagtcgacgatcggctcggcttggctgggcagcgtcgaccagagcagaagtggcgtcagaaagaccgaggcgatctcgctgagaaagacgacgagcttgagggtgaagagccgcgagaagtcgtcgagcacctgtcggtcgcgccgtcaaatgatgtgtcagccacggagggatgggtctgtcaaacgaacagccacgcacgtaggtcgagtgtagccggccctcccagtcggatggcatccagtgcgtaaagtactcgacgccgcgcatcagcacctctgggtcgtaggccttgcggctctcgctccctccctcgccgccggtccgggtgacggccaaaattccgccacatagcgtcaggtagaagaggaccgtccgatgaggcgtgatctcgagcgcgaggagcgtggacgggtcgaggatcgtcaggaggaggaggaccgcagcaaacgagccggcgatgaacgagacaaagctagagccgagtcgtcagctgtgggtcgagtgatgccgacgatggaggaagagacgcaccgcatgacgatcgccgtccgctcctttgggaactggtcaacgtatttgcgcgcgatcgggagcgagcccgcgagccgacgctcgaacaggtgcgggagctcgttgtactcgcgaaagagccatcgcgcctggggcgtgtacgctcggccgccgatcgacgacggattcttgtgatactcctaaaaaagtcaatgagacggtcagcgacgcgcgcatgcgagcgacgcagcggtcggctcacctcaaagtagcggaaaaacgagtaaacgacgaggtagacggcgatggccgggccgagaacgacgttaacgagggccatgaagcgcaaccgacgccgaagtctgggtagatcgtgttcgtcagcgctagcccgatccaagcaggactgcccgactcacgtctctgcgaggacgggccggttgccctttgatctgaggacgccccgacgaacctcgcccccggccctaccgtcaaacagaaagccgagcaagcagaagcgcaggttccagacgacgacgcgcgtcaaccactggcgttcacgcaagcttgccggtagccaggccggcagaatccggtcgagcgagagatcaagccgaggccgaggcggcgcggcggcagctgaggctggtgtctctgttgccggcccgggcgagaggagggcgacgaggtagttctcctggcgcatgagccgattggcgatgctgatcaacgagaacggggcggagaggtgttagaaagggtatgattgaatcgccccgggcgagaactgactcgtgtgcgtcaagccggacggcacccgctcgaacgctggtcgcgctgttggcctccctgatgccctcgatcgcacgaacgacgtcgttccagttggtcgtctggatgtcctcgtccggcatctcgaggaggtgatcgaagaagcggtggagtgcgagcagccgtgggatcgagcggatgaaggaagctagctggtaggcatagaaggagagaaacaggagggacagaaaccaggcgccgaacgaggccctgtcgtccgccacaggacagatgtcagcctgggaagagcaaatcacgtcgagcaattctgcaaaaggatgacgtacgacgatgcgcattgcggcacgaggacccttcggaggggccactgctctccgaggccagagtgggcagcgagtgcgccatagtcgacgcagcggagcaagaaggacgagaaaaagatgacaaagccgaccgttctgcaaggcaacgaggtcagctttgattgctgtggaaatgccattggcggacgatgcgtacacgaggttgagaccgcgagccaggaggatgcagaagaggcccttgccaaggtagaagtcatagacctggcgcgtccgaccgtgcgtgcgtcagcgcccgctcaccagccacgctttccgtaagatccccactctgagtgccgacccgacgtgcacgcacctgaccgagaaactcgtcgaggtcgtcaacgttgacccactcccagagcgcgcgctccttgccggccagccgccgtcgactgccatcggcccgacgcccccagccccagctggtgaccgcagccgcccggtcgcgcaagctcgtcggcccacgagtgctccgacggctgctgctgccgtatctgctcgagtcgccctcccgccgcttgtgggacttgcgccgatgatggcggtcggtgccgcccgcgctgctgcttccgccttcgccggcgccgctctgggctgcaactgtcggtggcgggagcaggaagccggcttcgctctcgtcgacatcgacgtcggctgcagcagacggcgagcgaaaatgcgttgtcgacggcgatccgctgggcatatgcgtcgcgtctcttgacggcgccgtctgctgttgacgccggaaggtcggcgacagcctacggcggcccgactcgccaccgctactgctggcgctgctcgagcccgagcctgcgccgccgttctctggatccacgaaaggtccctcgtcgtcttcctcgtcgtcgtcgacgggcggagcgtcgagctcgcgagccttgcccttgatgctgttgctgttgctgccgccgccgctgctggtcaccatgccgctctggccgattgccgacgacgatgctgttggtccgtagaagaagggtccatcgtcgtcgtcgtccaacgcagcgccggccagagcgtctggcaacggccgccggaaggagcttgagctcccggacgaggacgagcgcgaggtggaggatgagctcgaggccgagcgggaggagccggccgggtgctggctagcgtcctgaccgagttcggccagacggatggaagcagaaggtgtgagcgaggacgagccagagtgtgccatgcctgacggccgggatggatggttgcaggttgcggatgaggtcgaggggggagggaagcaggagtcgagcgagagatggctagagcgcgaggcgaggcgcgcgcagcagaacagccgacgcgtaccgcgactgctgtcgctcgggcagcagcacgattctcgcagctgatagtccgggatcgcgtacaccgttcatctcaacccttctactctgactgtcaggagttgacaatccgtcacggccaccttaaatccgcgagccgtggcaaagcaaatgtacattcagagtcgatcatcagtctggtccgtccagtcgtctctttagccggcggcgatgaacccgccaatgacagcgacagtgacggcgaatgtcgacagcaaggcaggccgctgcagctgctggaaaccggacgaagcgacgacggaggccgggtcgtaaggcagggtgaggctgaggggtgagggcgcgcgggcgtcagaaagagcgactgggcaagttggtgcggggacgcacgcgctttgactgcaagaatatgagattggtcagggcaaagagcgcgagtcgggcgtcaagtcgagggacggttatctcaagggaagacaacctaggtctcgcgaaggagaggggacagactcgcacggccgggtcgagttctggatgaacacgccaacgaacatgagcaccgcagttgtgatggcattggtcctcggccggatgtaggcgttttcggcatagataagtctgtgagaaggggcggcaacagggagttcacaggacctgtcgggggtaaggaagcgattgtggagcgctcagggacggacatcatgtggccggcaggtacatctggcgtccaggtccagctgctgccttgatagttggtctcggccgtgtagcgaaagaccttagcaagagagtagatcgctcggtaagcttcccattcggacaggcgccgccgccgcacaacacgcactttttcactcagccggtcctccatcgaccagaccgtgatcgtggcgttgtttgtcaggcgcctaacttcgttcgggccgtccgagatggcccagtcgaagcggatgggttcgcagtagaatatttgcggcggggtgttgcgagcgtctgcgaacaaagagagaggcgtcgagcggcgagcagggtggacgagaagggaggcgtcagcggcgagcaacatggacttcagacggagcgagcctgactgacgagagaaggtcgggacgtcgcggcgagcaaggcgaacatcctggccgtcgtcgacaggcaggaaggcagccgagctgagtgcaaaggcccaggcagcgagggcaggcaggaggaggcaggcgaatgaggtcgagagcttcatgctggcggcagagcgagattgatgttgtgatggggatcgatgggcaaaggatgaagcgccttggcgacctctgttgagggcggcctaggttggcgacgtcttggacaacccaccgtcagatgacgcgggtgccgcgggtgcgagctcgtgccgagctggtggagcgaccgacgattaagcccaccgcggccggctccgaaagaattgagcacgaggcgtcgtggcggcggcggccgggcggcgaagacccagaagcggcgagtcgatgtagatggacatagaggtgacgctgccaggacgaagcagattaaccagagagcgaggtcatgagagctttaagagcgaggcaggccggccggctgatcgaagcggcagtaggcgaagggcgcggcaggcgacgagcagggccgagctgcctgtccgacgtcggccctccgccgaggtgctgctcgagtgaacacctgcgtcagccatggtaagcctgctgagatgagtcgatgagcgaggtgggcaagatgcagaaggaaggttgcggtcgacgtcgggcgtggcccagaaggtgcagaggaggcggcggcggtccgcagcgcgctcgaccaacgcagagagccgggttggccaacggaggctcaagtacgattcgaccgccaaaagcagtactcaagacagcagcgacagcaatcgtagcgagcaggtcgaccgttttctccgcttgatgctcgtccggcggggcagaagccggacaagcgtgcgcgtagtcagacccctttcaatcgagtgcctcctcccttcccgcctgccaaacctacccgatagacacacgtcgccaggtcgtcaaaagtagcacatcaaatgatgtagtaacggtcgccgacatcgagccaggcccggtcgatcgaggccgtgatgactttgacgtccgggaaggcggcgtggacggcgaggagcgactggggtgtcgaaacaaacgtcacaaagaggatctgcgaggccggaatgtggtggtcgaggaggacgcggatggccactagagagagcgaggagggaagagtcagctgaggaggtaaaagcaaggctagagatgaggaaggacatactgagcgcagcggctccagtccccatctgcgagtcgagcaccatgacccagctctttgccgcgctctccttcgtcttgaggctcgccggcagcgtcaagctgtacagcaaaggctcctgcgatccctcgtcattgtggatgagcatcgacccgagccgggcgtcgctgacgacccgccggaggcccttctccagcggcccgcccgagcgcgcgatcgagacgccgacgacggacggcgcgtcgagcgccttgccggctgctacaaggtcgagcggcgtctgaaccgtcgtgtcgacgtaagggagctcgccgagggccttttcgacgaccctgcgcaacgcgcgcgtgggtccgacgagcgaaagaggggtcagcgtgaggcgcttggtacggcgagggcgtgaagacgaacatcgtcgcgagccggtcgcagtagtggacgaaatcctcgcgcttcgtctcgcgatcgcgaaggatcgtcaagagcccaagcaagcccgtcgtctgctcgagcagcaccacatttgatggctgaccgccgttcgaggcttggtccttgcccgaggccggtgccgggttagaaggcggtgcccgctgaagctcggaccggaacgagagcgatcgctcggcgagctggcgccggatgtgcgtgacgatgagctcgactgcgacattgttctgcaagccggggacgatctgtgaaagtggatcattagacgcgggtcgggtttgccgaggcaggtcgaggcgtggtcagccttggcaagaggcggcggaaggagagaagaaagcgaacgcacaatatcggcgaacttcgaggacggaaggacaaagttgtcgtagctaggcttgacaaacctgcagcaacggcagcaatagcgaacgaagcgtgtcagccagggcgctgacaccgggcagaatacagagaggtatctggacgcaccgcaagtactgctcaatgatgcccgcgacgtcccgcccgcgctcctcgacgtcgcgcttgattcgtcgggcgagcatgaggtcggtctgacggcgagcgagaggcgcggcggagaggcgtcgccggacgtacggatctagatggatgggccggccaagagggtcgacgagatcattcggagaaggcaagcgagtcggcaagacgcgcaatcggaccccgagagtgaaaggaagcagtcagctttcggcactcattcgtctctgcccgacagcgcaagccccagcgcagcccgcaaaaggactcacctcgaccgcctcgcccctcttcaggccctgcagcacctcctcaaaccgctcccagtcgatcgccttcggatggtcaaagtcgagctcgctattgaacgcgagctcgagctcggcggcgtcgtgccgcttgtagaacgagtcttgcgagaggatcaggacgttcgggacgtgatttagggccgagaggatctctttggcgacggacgtctggccgggcgagttgggggcaagcggcggtcagtcagcgcaagcgatctccctcttggcacgagctcgagccaggagactacgcaatgcaccttgcctgaggccgagccgcccgcgatcccaatcacatagcacgtcgctgcctgaccccttctattgtaccatggcggccggccccacgagtgccggccgaggacgaccgagccgccgcctttgcggtgcgcgggcgtgccgggcgacggcgaggaggagggggcgcgcgagaggagcggggtgaggagcgggttggcgagcgccatcgctgctgggttgctgggtgctacgaattgctgcttgctgcttctgctgagtgcttgctgctatgctatgttttgacgacaatgaaggaaggagggtgtgatggtgcaagagatggcgagcgtcggacgggggcacggggtcgtccgcccagccgcgaaggtttggctcagcccacgcgcagcagcaagcagcgaacgacctcataaagacgggacgggcgagcgcgcaactcaaccgggtcgagctaagcaggagcgacggcgactagtctgccgtgcttccgtcttgtaactgaaagggcaagctgcttcgcaaagagacgtcgaccgccggctctggctctctgtctatcgtcgcagtgccgacctttcaccatcactccttgctcgactcgcacgagggcagcatgacgcttcatgcgccgaacagaggcagcctatccatctcttcatagcgaccgtggttgtctctctctctttcggaaggcgcagcgagtgaagcacagacatgacattgcgttgcatcgtgctaaccggagaaacgcttggctcgaacttcaaacggaagaaggaagggcagaacggatgtccatcaccagcaagagccagtccctcgctatatccccctcgcagcgcgcaaaacgcgcgccgaaaggaggggaggcagaccggcgggcaaaaataggtgaagggtcggtcttcccccgttgagggaccgcccggtgaggggcggctgaagcgcctggaagcctttgagcgtctggtgggacgagggcgggagggctccagacgggggttggggaggggagaggagtgtgcggtaggggcgaaagacagacgcggatgcacggacgctggccgggccagaacgagtcaacaacgacaacgactacatgtcacgaccgctcaacggtcaaaccagggtcagcaggcgaccgagacgaggcagtcgcgcggacgtgcttgtcgttctgtattgatcggcgataagcggcgtaaacaggagggtctgcaaagaaatagaggagagtcagcgacaagcgctcgagcacgactagtaaggcggaaaagaggaagaaagggaaaggcgcgaggctgagaagggagatgtctgagcccttaggcctccgccgtctatcatccagacgagaaggcagacaagggcgtctgcatcctcccttcgcgctcctccagccggccctcccccgagagagaaacgctacaaccgtcctttcgaacgagagctaggccggaaggagggtgagagggggggtccaaggaggtgtgcccgcgagatgaccgtccacgtcgggggtgaggacgcgggcgaattacggtagacgcggggggtgctgaaaaggaagagagagagagagagaggagcacgcaccagcaataggcaagagggctgtatgcgagcagtgagtgatggtcggaggcaggaggcatggctcagctgggcgggaaaagtccaggagcggtcggtcgagagttgcatctgcaagttgttgaggtcggcagatgcgagtcaaggaggccggcgcagcccgccctctcgtgtgctctctctcgcgccttcctcctgctccgaccatctttccctcctcgccaatccacccgacgtcatcggaccctcttgctctctctccacccgctgctcgctcggctccgactgctcgtgacgtcatcgtccttctcaccgaggccgaatggcctcctcctctaccgcgctcgtcctcccggcctcactcccttacccgatcaccgtcttggccctcgccccgcccggccagatcacacggggcgacctcctcctcgcctacgcctacacctaccgcccgccctcagcaccgcccgcagccgccgaacgccgctcaggccgctggctcgcacccctctcggggacgctccccgcccagcccgagggatgggaggtcaaggtcggcgacgtcctgcaggcgtccagggccgttgggtcgatcgaggaggagtgtgcacatccggtccagctcggagggctctgtgccgtctgcggccaggatctgacggtgtgagtctgcgttcaaggcgagccgaggcgaggcgtcagggagagcgagggagggagcagcccagcggcccaactgctcatcgttgctcgctgtcggctcgggcggtcggttgtcgagcctgcgagctgaccgtcacagcacgatctgtcgtccaccctttcgtctgcccacaggaccgactacctttctgcaggcctctctgccgaccccggctcctcctcctcctcgccccgcaacctctccccgtcctcctcctttgcctctcaaccggcgtcccaatccggctcgcatccaacgccactctccatatctcattcaacgcccctcctcaaagtctccccaaccgaagccgcacggctgcacagctcacacacggcctcgctccatgccgaaagaagactgacgctcatcgtcgacctggatcagacggtcgtgcatgcgacggtcgatccgaccgtcggcgactggctagccgagctcgaccctttcatcccgccctcagaacgacgactgaaaggcgccgaggcgcgcgcaaacctcgcttccgtcggccgatttacgctcgacgagctccgacctggcccctcctcctccgcctcgtcctcgtgctggtactacctgaagccccggcccggcctcgcagccttcctcgagcggctcaacggccagtacgagatgcacgtctatacgatgggcacacggagctacgccgatgccgtctgtcggctgattgacccagagggaaggttctttggcgatcggatcttgtcgagggacgagagcggaagtaagtcctccctcttggcctctttgcgctctgcctggccctccttcttctccaacccctcacccgctcccgaccgtcattcaacgagccaatcgccgccctgctgactcttcctctctccccccctctcccccgttctgcgaagagagagagagacgtcagcgagggatgaggggtcaaggccgagagaaagaacgcacgccaaacagcttgaggccgaggagcgagccgaccgtcagaaggtcctgcttcgggacgccgcatgtagaccccaggacgcagccaggtcggtgccagatgggtcgaaatagctttcagatcgggagacgacgtaaggcctgcgccgagagtggttgcggcctgttggtggacgaaggtcggtctagaatctgatgaagcgagcgataggtcagcccaaagcataacgacagtgcagcagtcccgcaagagactgaccttgagacgggcctggagacgcgcgttgaagacggtcgggcaggcgagcccggaccatgacggaagcgtcgagcttgggcgcaaagggccggagttgacggctcgcggccgacgggtagtctccgcgatcgactcatccgggggagagagaaagacgctcaacccctagcgcttgccttcctcaaggaagccaaacttcctctttgcccgctcagcccgctcctgccggctgagctcaagctcggcgggtcgcgtgctggcctcgtcgtcgaggctgacgagccggcgggtggcggccggacacgggacggcgacgatggcgaacgagccaaggaaggtcagggcaaagagggtgctgattgccgagcgctgggtgcggccgaacgaccggaagaggttggccatcgtgacgggctggctggaagagaggcagcttgtcgttcggagggagcaggtcgggccaacagccaacgaggcgttttgctccgcgctgccgagggcagacggaggttcccacagtcaaccgtagacccgcccctccttggacacaacgacgacgagcttgacctccctacatcgacttcctctcggagctcggcactcacaactgacctcttgaaagctgtcgctcagaccttcctccttgacgtcgcctccgcgggctcaaacccctcgtcccgacggtgctcacaggtcgcgagtagcgacgactgtccaatctgctgccttgtgcgtccagccacgactcgctagactgactgccaagctcgatccgcccttgcagcgtgacagttctcgtacgtctcgttctcccgcacatgtctgcggccgctcgggaggacggacggattgcgaacgttactcaccggcgcgctgtcaccctgcctcgcctcggcgcgacggcttcgcgctgccagaaccttgctcttcccgccggtcctgaccagtgctcgtcatcgcactgcgaaggcggtcatcaagcctgagctgtcgtgcttgaagcgtcggcatccatactggaggggagggggcagctcgcgaaagaggcgactcggtgggtcggcggtcgtcgggtcgcgcgcagctgcttgcgtcgtccggctccggcttcgcctcgcttgcggtcgcaagaagctcacctgctcgcttcctcctctcaatcgtcgcctgtactcacgagcatggttgatccctcgccatacgagccaggatagcgtcctccgccggcgtcaccgctggctcgctcctcccccttgccctgccatatagctcgacggctcggcgctgaagggcctctcttccctcaccaactctagcatctcctcgtcctcatcccagcaaccgcgtcgagacctctacatactcgattatctgtcgcaagctggtccatcaccgctcgcgaacctctcgtcggttttcaacactctaccagtcagtcccctcgacagatggccaaccccccttgtcgtatcctgatccgccttgctttgtgacgctctcagcaatgttcctctcgctcctcatctttctccgcgaaacgaacctctggtcctcctctgatccagaagcaggtaagcgctccggctcatgctcggtctcctttctcgtgctttcgctgacattcgtcaacgcgcaccaaagcaggactatcgacgccctcctataccgacgagcccgcacggaggttatccgaggtcgaggtcgagcgaccgaggacgcgggccccggcgcgtgcctcatcagcgacgacctcagccaaggcgactccagcgccgacgagcgacgagacgaagggttcgaggtcggctgcttcgtcgatcaggaggagatcgccaagctactcggggccaacgtcagatccgaagacgaagtgattcgcggcgggatctcatgtctttcctgcacgcgatccttcctgcctggggaaacatagatgggtgcaagtacagtgggggggactggccagcctgccagaccgagaggaatacacgaggggaggggacaaggaagggcgagaagggaagggacaggagcggctcatggctcgtccttctggacgttgacggtctcctcgtagtaggtcccgtcctcggcaacatacgattctgtgccgtcggcgcccatctccagatggtactgctgccaagacggggcatcacgaagttagcgcagcgctcctcgagcgagaacggcaacggtgacacgtacatcgatgttggcggcgaggccggggctctcgccctcggcgtactcgccctcgaccggcgtgtccaggtaatagccgctctcagagaggcccggcgtcgtgccgtcgtcggccatcatgcccgggtcgtcgtcgtacgacgcgtcgcggaactcagtcctgtggcagggatgacagaggagctcgttagcggagggagcgaaacggcggcgacctgaagcgcgacgcaccatgcgaccatccacgggtgctgcgtgagaagctcctcggccgtcggacgctcgacaggatccgggtttaggcagcagaggatgaactcgatgccgagctccgagatctggtccgggtcgggcagcggcggaatctcgccaccaccgatcctaagaagaggaaggcaggatcagcaagcggccctcttcaagctcaacactcgcatcaggcgatcggacgcacttgaacatgatggcccactcgttctcggccgactgccagggcttcttgccggtcgcaaactcaagggccatgcagccgaccgaccagatgtccatcgcgccgagccggccgccgggcgtgttcttgatgacctcgggcgacatgtacattggcgtgccgttcatcgagcccatgccggctgtccgggtccggttgatcgtccggtggccgcgggcgatgacttttgcggcgccaaagtcgacgagcttgatgatgccagcgtcagaggtgaggaggacgtctggcgtgcgggagagcggcagctcgtcagcggaaggtctgcgagcgagagattggcaagaaagagaacgcactgtcgggcttgatgtcgcggtggacgatgcccttctcgtgcagatactggatcgggcggcgtcaaaggtcagcgacagaagacgcggcgggcggcggtgacaaagtgaggggaaacgtacctggaggccctcgaggatctggcacgtgtaattcatgatgacctcctcctgctcgatccggccgtgctcgagcaggtccttgagcgagccgccatcgcagtactcttggaagatgtagaccttgtcgcggtggacctcgatgccgtagtactcgacgatgttgacgtggttgagcatctgcatgaccgacgactcgtcgcgaatctctttgtagacggtcggcaggttcgagacgtcggagaagcggatctccttcaccgccatcacagtgttttggtccatgttgtgcgccgtgtagaccttgccgtaggcgccggcgccgatgaagcggccctgctgccagtggatcgaaatgttggacgacgaggctgcgagggcgacgagcgagcggtcctcgggccggtccgtgttgacaacgcggccgacaatgtgcatgtcgtagttgagatgcgagcgaccctcctcgagcgcctggatgagccggacgcgggcctcgtgcgaaagccggacactcttgtcggcgacgccctcgccaggccactcgcccgcgaggcgccggattgcctcaccgccggccgggtccgacggtgacgctgaccggtagaagatgccgtcctcgtcgtgggccgactcgaggccagcggccatgttgcggagctcggcgagccgctcctgctccttctttgcctcgaacgaggatcgggcgccgaggatgtcaaagtggctgataaggagcgccatacagctcgcgaccttctcctggaggagcgtaaactcgcgccggtcgaggtgcaggatgttgttgccgcgagtcatcaccatggcgaactcgagggcgttgacggtccatcgaaacgtcttgtggtcggtcgggtcacagtcctcgcagatgaaggcgacccagttgattgcgagccgcattagtagccggctaaagcgcgcccaagtcggcgggtccatgtagatgccgacgcgctggccatggtcggaggaaaaggcgaaccagttctcaacgagctcttgcgaggccggcacgccgtggagcgagagtcggacgtgcgagaccgactcgacgatggcctccgagagccggatcgtcgcaacaccgatccggcgaagctcgcgctggatcgacggcaggtgggcctgctgctcaacgatgcactcgagctcgaccgtcgccggcccgccgtcgtcgccgtcgccaccggcgagggattccatgaagcgctccttggcctcagcgagccgggcgtttggcccgtcggcgatcagccggacgcggaggtcgtggaggtcgagctcgagcatcgggatcggcgcgtgcatgatcggcccctgccagaagaagcgctgcgagggcgtcatcaccagcaggtagcacgagtcgccgagctgccgactttcgtcattcgtgtcggtctcgccgtcaccgccgttggccgagacgcgccggctgccgttctgcggcttgggcgacgagtcggtcaggaaggccattgacaggaggtcgccgatcaggtgcggcttctcgcgcagcgacgggtcggcgacaatgtagacgccctcctgctcaaacgagccggtgtagacgaggaagtggcccgagtcgtagagcgccgggaggaagagctcaaggtcgacgtcctcaagcgagaactcggacgagttgtcgaatcggttcgtcaggcgtctgcaacgggcgaagggagggtcagtgacgcccacgggcacaggcggcgacgctgagtttcgcacctcgcgaaacgctggagcttccggtagcgcatgcggacggcctcgagaatcttggcaaaccaggcaaccttctcctcgcccgtcagctgcttctcggcaatgacggtgctcgtcgtcgtcgtaaccttgccgtcgaggctcgccttggtctcgaccgagactgtctcctcctcgaacgcgttgcggagcggccgactcgcgctcgacttcttctttggcgacgggtggccgttcgtgtttgcgaggacggtgatggccgggctcgggccgaccgaggggacgtggagctgcgtctcgaagtagtcgatgacgcggtgcatgagcttcttcgtgagcgagctgccgggcacaaagaacgtgagcgcgtcagtcgcctgcgcgtcaggagctgactctcgttgaccacgcaccagtactgctcggcgacgatgaggtcgcctcccttgatgacggctgcgctgtcgttgagaaactcccactcgtcctcgagaatctcggtctcgcgaaagtagatggccttgctgccgctcttgagcttccagtagaggagccggaagaagaacttgagggcctcgacgaggacggcgtcgtagctttcctggatgcactcgggcaggacccactttcgctccgagtcgggcgcaatcaccttgccgtactgcttcttcatcgtgcacgcgagcgcgatcgagagccggaagtcgtccgtcagctggtcgatcaccatgacggtcggattctcaatcttgagagcgtaggcgagccggacgcggagcgactcttcgacgagctgcgtcggaaaggcgatgagcttggtgatctcggcctggtagggcgggaggttgagctgctggaagatgtccgagtggaggaggtacgtctccttcgccgacgagatgagggtcgagacgtccgagagcgtcttcttctcaaacgtccgctggagcgagtcctccttgagaacgcgctcaacaaaggtcggcggccggaccggcttgccatcctcgccagtcccgccggccgagccgccgccgccgacccggatcggctcctcggtgtcgacctttttgacgtcaagctcctcgctgcccgtccacttctggagaatcgagatctgcgtccggagcgagaggacgacattcgaccacgagacgagggcctcgacccggcgctgaaactctgcgctcgcatagagcggcttggcgaggccgagcgcgcggttgtgcgggtagagcgactcggcgtgggcgagcttggagagggtcgcgagcacctggtcgaacgccggcgggtggtgttggaacacctgggccggaggcggactcggcgcgggcgggacgccgctctcggtaagagcgacgaccgcgcctggggctgccggcggcgacgacgggcgcgactcgcgggcggacgagagcggcgtgccgaccaccttgaagcggatgacctcgtcgaggatgaggtcgaccgtccgctcgcgccgctgctgaacgcgccgcacctcctccttctcggcccggccgcgcatgcgcgcgcggatcccccaccagagcgacgagccgagctcgttgcggaggacgtcggagcttgagcgctcgccgccgatccgcgtcttctccgatcggaggacgtcgcccgagagaaccgacgagagcatcgcctgccactcgagccgctccttgccctcgcccgatgtgccgccgtcgggctctgtcgttgctgccgacggaccgtgctgctggggcggagggtcgttgatcgagtgcgtgctggccgagccacgatgccggctgcttccgccgccggtgaccgttgtcgacgaggctgacacggccgggagggggccaccgttggcaccgcccgctgacgaggccgagccggccgcggcgggtggctcaagcggctggcggctcataccgtgtccggccgcacccatgtactttcgtgcgccgacgccagccccgctgaagcccttcatgaagcccggtccaggctgtggcggctggccaacgccccgcccgctcccaccagcgccaccgctggatccacttccgccggcaccgctgctgccgacgccgcccccgccgcgagcagcatctgcgccgccccgacctccgatgccgaagccgccgagcggtcgctcgtcgtccgagtcgccatcgaggtcgagctggccgacgttggccgtcgcgaagtagtttcggtccgggtcgtcggcaatcgtctttgagcgggtcgagccggtcgagagcttcttgacgggcgcgaaaggcgcgactgccgagcttgctgagccgccgctggcgaccgtcgagcggtagcgcgtctggagagtcttgaaggccggctgcggctgctgctgggccgggtggctgctgctgccggtcggcgaggacgacgtggacgaccgcgccgaggcactcgccgggtgattcgtcggcgtcgtcgggcctgagcctggctggccaaaggaaccatcaatgccacgggagggcgacgacgtcgactgtttcagtgccggccgaggttttgagcctctgtggcaacgggcagagcaagcgaggggaggggggaggtcagctcgacggcggaggacgccacgcgatgaagcttgggcgtcatgtcggcagacgtacggctggcgaacaggccgggcgatggtcgacggtccagcctcggctgaagaggaagcggccgtcgtcgagtcgtcctcgtcgtccgagcggacgttgactggcagggcaagggagaagagaaaagcaggtcagccttccgggaacggcgtgccggtgctcagggcgacgagggcggcggtgagagggccgccgtgctgagcctgcccgccgttcggacgcactgaaccgcagggacgagggagccatggccgccagagtgaggatgctcttgggataggtctcgctctgtgtggaggagagactgagggagggcaagaggagcgctggaggggatggacgtcagcggcaagccgatccgtcttctccggggtacgctcgagtgcagcccggatcacaatccaactttgattgactctgatgtcgactagaagccggcctcttgttgcagctgccagccccatccgacggccatcttcctctctctggccatgctgattccatcctcgctcctcagtctcgtccagcacctgcttctcctgcgacccgcgcctctcgcgcccatcgctgctgcttcttacggcgcctacccggtcccgctctcgcccgacccgccgtcgctcgggtcggcgtgcttccccgagccggtcctcggccggccgctgcgcgcgccgttcttcctcgacggggcgtcgaacgggacggcctggaaggcaggtcttgccgggccgacagacgaggagcagctcggtgcgtgcctgatgctcttgttgacggagaggcaacggcagagatggactgaccgaaggctgcgctcgtccctgctggtcgcctccgtccttagacgccttcctccgcaacgtcacctctcaccatggctgggccacctacggcgtcctcgaaggagcgagcgaagagggcagggatatctcttacgtccgatgctcgctaggcggcacggtcgaccgcaagctgcgcatctggatccagggcggggctcacggcaacgaggtgcgtccgcgcactggccctgctgcacagctcgggccgttctgtgccgccggctctccccagcagcttggtctactgacataagcgtccggccctccacgtgctttcttcagccggcaggcgaccaaggcgtccttgccttcctcggcgccctcgctgcgccagatgcgaccggcgcagcgtacgccgcccgcgtcctcgcctcggccgacctccttcttctcccgcgctacaacccagacggcgtcgcctactttacacgaacgctcgcgacgggctatgacccgaatcgggaccacgtccggctcgcccggcgccagacgggcgcgatcaaggcgctcctgaccggcttcaacccgcacgtcgcggtcgatgcacacgagtattcggcgcattaccggccgagggatggagatgaggacgaggggacgggggactgggcgatcgggagcgatgggctgttctcggcggccaaggtgggtatttcttgcccctccgacttacagcaacctgactttgaggtcttggcctgcctgcagaacctcaacatcgacggcgaaatccgggccttgtccgaagccctctttgcaaagggcattgcacgcgacctcgcaaagcaaaacttcaccggtacgtcctggaggccctgattctctgcggcgggcggcaacggctgatgccgcaggtcgtcgtctcctccggcaggcgacgcttacgtgaccggcctcaaggcgtcgcagcccggccagcttgcctttgctgaggctggctcggagagtcgaatcgggcgcaacgcggttcgtttgcattctcagcctcaatttgacttgctctatctctgacagcatccctcgtcgttccgcgcatgaccttctaggtcggcctgacgcagacagtctctttcctcctcgagacacgtggaatcggcctcgggccgcagcactttctccgccggacggcgacgatgcggacgatgctctcgtcgatcgtcgactcggccgttgagcatgccgagcgggtgaaagggacggtcgagcgcgggcgggagcggtggcgggagggaagaggggaggtggtgattcgggatcggtcaacgaagggcaggaggactgtcaggttgtgttcgcctgcggaggggcgctgtaaagcccgagaggtcgagtggcattcgtacgttgtcgcccttcgctctcaagccgtccgcaacgtctcaagctcaccttcgctcttcgcccgactgtggcagcacgacgccgactgtccccgtcctcactcgcgcccgaccggcagcgtacatcgtccctcgcggctggtccgacgtcgcggaccgactgcgggcgctcggcctcgaggtcgagacgatcgagggctcgttcgaagaagaggtcgaagcgctgcgagtcgagcgtgtcgagctgagtcatacttactacgagggtccgtcctgctcaatcaagtgctttttgtctcatcgtcgaactgactcgatcacacctctgcttcctcaataccttgcccgtcaggcgccgttcgtgccgcgattgagacgaccactcaaaggcagatggtcaagctgccggcagggagcttccgtgtgccgtcggaccagcagaactttgcgcttgcggtcgctgcgcttgaggtgcgtaggctggccctcccctgcatgacgagccttcatgctgacgcccacactcgtctatcggtcgcgacagcccgaaggagtcgactcgttcgcggcagtcagcctgctttccgtcgcaaagggcgacatctacccgatctaccgtctgctcacagcctgagaccctgatctcaatgcgattccgtgcaaagtcgcctgcgcttgcgctacatcgacctcccttgccgccggcgcatctcgcccagggctcatgggctccccttcaagcgcatccagcccaccaccgagtgtaaaaggcgttgctccgactcggtttggcgttcgccgaagccaccggaatgcctgctctgatgatttcttctgataaaagctgctgcgtgcgcgaccctgtgcgcgtctagtccttgaagtaaggcaggatccagctgagcttctcctttgcctcggccgtccagttctccttcttcgaaatgacggagaactgcatgccgccctttgcggcggtgaggacgtcgccccgctcgacaatgtccgagacagaggcgaggatttcggaggcaaccttcttggagaggtgggcgttggtcgtcagcgtcttgatgacctgtcgtgtcgaggccgggaagcgcacggggacgtcagcgtcggaacaggggacgagatgggcagaagaaaagggaggctgacctcctcgaccgtgacgggctcctcgccggcacgccaggcgtcgtagtcggtcgacgtgcagatgagcgcgtacggaatctcggcctcgcgcgcgagcttggcctcgggaatcgtcgacactgcgagagggcgtcaggtgtcagcgccagccgcgaggccaccgatgagaggctggacatactgttaatgatgtcaccaccccactggcggtacctttgaagcaagcagaacgacaggtcagaacaattgaggatgcgtcggccggcgagcgacgcacatgagcgactcggcccgcgtgctgaactgagggccctccatgacgatgaccgtcttggcctcgtggaccttgacgtcctcgccgtcgggtccagccttgatcagcgccttcttgacgagcggcgtgatgtgctcgatcagctggttgtcgaaggggtcgccaaacatggcctgtagatgcgaaggaggcgctaatgaaagtcagtcgggctctgctgaaaggaagtgttgagcacggtgacggacgtgagcgacgacgccgagacccgagaagaaggtcgagggccggatgcccttcgtccggtcgatgatctgcgtcgggatgatgaagtcggctaacggggcgaggcggacgcgtcagaaggcgtgattgagtcgagagcaagccttgagcgagacgcaccaggggcaatctcctcgcggagcgagccgacggccgagaaggcgacgatggcctcgacaccgatgctcttgagcgcggcaatgttggcccgggcgttgacctcggagggagggatgttgtgcgagacgccgtggcgcgagataaaggcgacctcggggccggggacgttgggcgcgtcggccgtcggcgggagggtgaagatcgacagggccgacgagggcgtgccccagggctggaggaaggaacgttggctgctggtcagcgacgctgcgctcaagttgcagacgagcaggaggagggtcgggcgcacagtctcgacgttgacctcacggctgccagaccaagtgaggggcgaaaggtcagcgtgatgagagaccagccccgtccagccccgtccaggcgacgcacacaaaggtgaggttgtcgagcttgtagaggcccgagccgccgatgacgccgaccttgacgggcttgttctgagcagctggagggaggctcggcgcaaaccgaaggcgggtcagcgcatggcctggctccgcgggcgctacacctcagctcggggcacgagcagatgagccggaggcagaaaagcacgagtcgaagacacgcacgagcagacatgattggagatgagggaaagtggcggttgagagaagggtgctcaaggcggtcagcccgaacctcgccttccttcccctccgagcctggcgtccacgagcccgcccacgccaggccagaccagcaggagctcgtgcttcgcaacacctcacctcacctaaccgaaccctcacctcaccacagatgtggtgcacctgatggcctgcccggtcctcgctcatcagcgccgcagctcgaagtcaagcccgccatcaagtggctgaagcggccgtttatgcgtgaaccgcagccccccccacagagcgatcatgtcgatgtaccgtcctcctcaacgcgcaagcgcttgcctagtgctcggcggcgtggcccgcagcccaaggctggtacgcgcccccgccagccttggtccgaatctgcgagagccgctggcggtgggagccgttgcgcttggccatcgcgtcggcctggtcggcctggccgttcttgcgcacgacggctgaaggtagcccgcgaggaaaggtaaagtcagcgttaagcgaccggcaaatcgctaaatagacacgacaggcgtaccctcgtacttctcgccgagccaggctccaagcgcagcgttgccgccggcgccctcgggcccgagcgagcgtgccatctgaagtgccgtttcgagcatgacaatcgattgtttctcgcgcgtattctgcggggcggacgaagggcagagacggagacgggcaagcaatggtggtcagcgagagggcggcgtgacgtactatggccggctcggagacctacgacgaagagggcggccgttagcgagaggatgattggcttggccgagttgtcgagcgagccggaggcgaggtcaaggcacgacttcatgtactgcctgctcggagcgaagagcatggcagctgcgtcagcggacagtccggcaagcgcacttcaacagcgagggaccgacttggagcggaggatctcgtcctcgagcacgccgagcacgagcccgcccgcgatacgcaagccgacattggcctccttcgaccggccactgggcgtccctgcgacggcgacaccgaccggcatcggacctccccaggcgtctcgcgcgagcgtccgcgtctctttgctcacttcggcggtacggccgaggccgatgagcaggccagcctcacccagccgagccgcctttacgaggtcgacgctgatcttgggcgtggcgctccggctcagtagagatgacggcgaggccccgaggaaagctgcagcccggtagaggtcaagcgccgacgccgattgacccgtcgcatgggcgaggtaggcctggaggagcgtgatctgcgcggcaaaggcagcaaacaggccgtgctgacgcgcgtgagccgtcaacttggcgagaatctggcagacggtgagagtgggatcagcagggcaagacgcagacagcctgtcatgatgcgaggcgaacctgtgatgcagtgccaaactcggaccggacgacagcaacgccggccgtctcacacagcagctccgccttgagcacctgccgctcgcgctcggcggccacgaggtcctgaacgcctgcatcgggcgctgaaggtatcaatgacagcgaggcagcgttgttagtcggctgcgctcgaagcgcaacttcagatcgacgtacgcacaagtggatccgccgtcgtcctgggcgagttgccgcaagccctcctctgcaaagagccgcttcttcggccgcttgccggttggatcgcgtttggcgagcgctgtcacgaggcaggcgagcacgtaaagcgtctgcggcggcgtaaaggcaaggagaagcgaatcgccgtcagagccaaagggcacctgggtcggatgggcgggagtacttgggtcagttgtcgatcgcagaaccgatgcacaggtaaggcggataatctggtgcgcacctcgaggagaccgccaccgatgccagtcatcgcaccgtcagccccgccgccgccctcgccctcggcgtcgagtagagcgtgcagctccttgacccgtgtcgcacatcgggctccttcaccgaggtggttgagggcgagcacgacggtgacgaggtagtgcgcgcgcagctggggggccagtgagggaggcaggccggagggtggagggtttgacggtatgggaaagacgtcgcctgtgctgccctcaccgatatctgccgtcgttgctgccggcgggacgggcgacatctcggcttcgagctcggcgcacagctcacggcactcggcccacaagccctctttggcacagatcccaagtcggccgatgcctgctgccgcggccagtgcccagtcgcttctgttgagagccgtctggcggaggtcggcaagcgtaccgagcgcgagcctcggcttgccgtacgcaagctgaaggctggcagtggagaatgccagccgatagcgcgctgcagggaactggagtgctggatgctcggcagccttggcaagccgcttgagggcgagcttcggcgagtcctgagcgtgggcaagagaagcagcgtgagctgatgcgctgaagtcaaagggtatcagagacggcacgaacgagaagggcggtcaaggctgcctgtaggactgtcagatgtgagaggtagtcgtgcgcgaggtgcgagtgctaagggagggagcgatggggtgactctcagcctcgtcagaagagacgttgatcaagtcggcggtaggcgcaccttctggcagagcccgacctgtaagggacgagcatggtagtcagcacaccgcctcagccagccagcaaaagcagcggactcggactcaccgctttggccagcccgcgctcgagttctcgtccagcagctgcatcagcctctccttgccggtcgcggacgccgacctggtcgcgcagcacctgcagcccgatccagccttcgaggcgccgtagctcgacctcctcgcgcgggctcagggtcgagccgccgcctgcgggcgagagggtatgcttgacgagcgaccagacgacggtgagtcgcccggagccgagcggggccgagggcgagacggcggaggagagcagctggtcgagcacgtagctgacgagcggcaggggcaggacaagcgccgatgatgtacgagccgcctccacgtccggctcgacctgtgcgactgagctgaccctgcgactggccggcttcgacgcgctagcagcggcggtcggcatagacggcgaggaccgtcggtgaccggccgtcgtcgtcgtcgcgcttgacgctcgaggtcgtgccttgacgcgtcgggccgctggcgtcgtcgatgtgggcggagcagcagcaacagcagtggccttcgtcgtctgggtgactcgtctctcgaggaccttgaccggcgtcagaggagagctctcttcttcttccgagccgagcagaaggacgtcctcgctcgtggcagcggcggcaggcgctgagggcgaagcctcgtcggctgacgacgcgtcgtccgaggcgaggtcgacgtcgctgccctcatccgactcgttgccgtagctcggccgcggacgtgaccgccggcgcgagggagagggcagggtcgaggtcgcgagcggatgcgggcgtttcggtgccatcgttctcctggccggcgaagagggacggagacgggaatggtggtcgagggcgagatctgagagcagccggcagcagcttaaagcgaaccgagcgtcccgacgatcaagctgctattcgaccacgaccgacgcagcttccttcaatcccccttttgacagcaacccctcgaatcttctacactgcgagcacggcgtattgaactcaaagatcaactatccttgctgccagccgggccgacgccacgatggctcgcaaggacgtcgacgacttctccgactctgatgacttctcggacgatctcgatctcgacgacgacgacatcctcgacctcgataatgatgcgcactcgtacccggcccggaagcgcgcgctcgagaagagcaaggccaagggcaagggaaaggtgacggatgccgcagggccggccaagcgaggcaaggccggcaagggaggcgccgaggtgagctcatccgctgccgcttcctgctctgctaggccgttcgcttataccgtatatgcgtctggtcgctctaggacaagggcctcgcacgatgggagggcagctttgaacggagctgggacgccgtccaggaggatgaggagggcagcctcgagagcgcggtcgagacactcgtcgcacgaggcagacggcggaggtgagcagacactcctctcatcatctggcattgtcagcctggcggtagcctgctgacgagagtgctacggccattcggtgtctaggcagcagaattcggccccggtccggcggacgatcatcaggcatctgaccatcctgctcgacctgtcggacacgatgacagagaaggacctccggccctcgaggtgagctctcgaccttcagactgctcttgaagacgagcttttaactcgcctatgcctcccagattcgacctcacgctcgagtatgtgcgcgagttcgtcgccgaatggttcgatcagaaccctctcggtcaggtgcgtcgttatatacgtgcacatgctggacaccgcagctcaccgtcagctgcatctcttcacccacagatcggcatcacgggcctccgctccggcgtcgccgagcagctcaccgagatgggaggtgtgtcggaccgtctgtcgccttcctcgtgcggtcgctgacagacgaattttctgggatcggcaggaaacccgcaagagatccttcgcgtgctgcaggacaagcggcgacttgagcccgccggcgagccgagtctacagaacggtctcgagatggctcggagcggtatggggtcagtttcgcgttgtctgccctctcttagagcgcccgccgctgacgcacgctcgtctgacggaccagccatctaccttctcactcgtcgcgcgaggtcctgctcttgctctcatccttgacgtcgtgcgatccaggctccatctcggacacgctcgaggcgctcgtcacgtccaaggtccgcgtctcggtcgtctgtctcgcggccgagacgaagctcgctcgcgacctgacgatcaagacgggcggcacgttcggcgtcgccttgaacgaggggcacctgcgcgacctcatgtgggagagcatcccgccgcccgcactaacgggcactcaagcgagcaagcagcctgctcccggcgcccggtcgaaccagccggcgtcggacctcatgatgatgggcttcccgacgcggctgcccgactcgggctttgcaacgctctgcgcttgtcacgccaacctcaagcccgaaggcttcctctgcccgcgctgcggtgctaagctctgcgacgtcccgaccgactgcgacgtctgcggcctcctcgtcgtctcgagtccacatctcgcgcggagttaccaccatctcttccccgtcgctgcatgggcgatcgtgtgcgtcctcggccggctagcgctgatcgtggtacgacgcgagctgacagtcgttcacgcttatgcttcccaggcccatcccggtcgacgcaccgcctctcgcaccctcgtgcgaaggctgctcatcgccgttcccgcctgtgacgctcgcagcgccgccccgcggggcgcaacaggcggccgaggacatcggactcagccccaccgggcgttaccgctgcccgaaatgccacgccgacttctgcgcagattgcgatgccttgtatgtctctggctcggctgctgctgctgcagatcgttggactaaccagaggctttgctctcactcgcagcgtccacgaggtcctccacgtctgtcccggctgcggatgacatgctcttctctcgcgaggaccggaagggaaaggaggcgggcccagggtagtgagctgtgtaaggaaaagctcgctgagcaagagctgcgtcggtcgtgcagaatctcaaggcgctcaggccagccgcagaggcgcgtttacccgccggcgccacactcgtcgggccgaaattgaggggaagggcgcatattatgagtgacacgagggaggtgggggggctacatgagtgttttgattttgtgcgagatctataggggttgtctaagaaagagggggggggggtctgcgagcagcgtgagggaagaagcaaaagcagaggggaacaagaagctcggatcaggccgtcatgtcgtcgttgatcgggctgcccgagcgcgagagcgagggcaggttgagcccgccaccgctgccgccggcgccgtagccggccgactggccaaacgcctgccggacgctgtgggcgaggtggctctgctgagcgttcgagtgtgccgaaaccggcgagccagggcgcgaattgctcggcgaattctgggccgaggccggtgccgacgagaagcccgagaagggcacgttcggtggcgggagatgccggctgtcgggcggcggcgggatcgacgacgacttgaggatgtcctcgaccgactgccggccgccgctgagcgagctctgcgcgaccgcctgctgatgctgctgttgtgcggcatgggccgcctgttgtgcttgctgttgctgttgctgctgctgagcttgctgctgctgctgttgctgctgctgctggaggagctgctgctgctgggcgacgagatggttctgctgagcctgctgcatagcctgagcctgcgcttgcgcctggcggatctgggccgcctgagccgactgctgctcggccatctgctgctgaaaactcgcctggagggcgccgcccgagaggttgcgcgggagcccttgcggcggcgacatccggcccgataggcgcgaggcgttttgactctggcggtcgagctgctggccgagatttgaggcggagtggagcggcgactgtgtgttgggtgtgaagtgcgagtgcggatgcgagctcgggtaggggtgggccctgaggggggaagagggaaaggatgtcagtcgaatgtgcatgagacaagctcaatcggcgagcgacgcaccggtgcttctggtgctggtggtggagcttgttgccgacgccgtggccctcgagccgggggtccatctcaaagtggacggggctgccgctccgcgagtgaatgcggctcgtcgccgggctgttgacgccgctcgtcggcgcggtcgacgtgaccgagaggttgccgagcgaggccgcatacgcattcatgttgagcgcggcgttgttgttggcgccgccgagcggggggaagatgctcatgttgcgcatcgaaccgaggtcgggcgaggtcgcgccggcaaaattgtaatcgttcgggttggctccaccgaggctgttagcggctgggtttatgttggcctggccgatcggcaacatcgcctggtcctcgagctcttcggacgagacggacgacgcgggcgatgggccgaccgagttgtcggggttgcccccgaggccgtacgagagcgagccacggtgcgagcggaagccctgctggccccgcagctgctgctgctgctgctgttgttgttgctgctgctgctgctgagcgagctgcatctgctggagctgctgcgcctgctgaggcgtcagctgaccgttgtttattccgagcgccgcgctcaggttaccgttcgcgccaaagaagttttggccggcaaggttcgaggccgacgagccggccgacaggttgccgccgaggccgacaccgaagccgcccgcgccgccagtggtcgcctgaaggctgagcgcacgctgggcagctcgcagccgcttccggtagctcttgtggcactcggagtgatgacagtttggcggcgtcaggtaggtgaggtcggtcaggttgccggcgccgacggcatggtggacggcctggccgggcgcatggaagtcggatccaccgttgcctccgagaccggcgttgccgttgccggcagcagcagggttgctagtccaccggtcgccgcggtcatcaaagccaaagccgccgttgttgccgcccatgagcgcgccgccgccgttgcccgagttgcggccgctctggccaatgatttggcggtgccgcatctcgtactctgcccgccggaccgactcgctccgctcgagctcaaaaagctggtccgacgcggcggccgcgagggccgacatctcattcatcgactcggagctgccgtcgccgggcgtgccgctgccagggcctccgaagccgccgtacggcttctggtcgggctgggtgcgcgagggtccgggcgtgcgctcctcctcctggcgagaagcgggggagaatgtcaatcagaaagctcatcgcgcacagcccgagcgacatcgagacacacctcctccgagtcgcgcttcttgcccttctttgacgagctctggtggatgcgcgcatgccgggtgagctcgtcgctccgcgagaagcgcttatcgcagcccgggtgcgagcacgcatgcggcttctcgcccgtatgggtgcgaatgtgccgagtctgtgagggagggacgagaagagggcgagaggaggtcagccgagagctcttgcgtgacggatgccaagctcgtcgcgcttaggctggcttagcaagagggttggctcgaccgacctggtgctcgagccggtagaacgctcggtcgcagagcgggcacttgtacggccgcgggatcttgctcttgtctagattgagcgccgcgtcggtcactgcgattggaagggaggaggatgaagggaggcttcgacgcgttaactctcctgactggaatcgcctcgcaaaagccgcgcgcgaggcggacgtgcgacaaggagaggcgccgcgggacgcacgggccttgacagctggatcatttgggtcgagcttgccggtgacggggtccgggaccggcgtcgcaaaggcgacgtcgttgtagaacgacgtctgcgacatgtcggcgagctcgtgaggaggcgaagtcacggtgacgagggcgagagaaggggaagaaggctagcgagcgccgcgcgaagctgtgaaaagtcgctgacgaggaacgttcggctgctggctgaggccggatacgtttgaagctggccttggaggagccgcgaggagaagagagcaagctgggcaagggtagagcaggcgaggaggtcagggccctgctcgtgctggtctaaggggaaccgcgccgccctcgtcgccgccggctacgacgagagcagcgggcggtggcggcggtggcggcgagcgagcgaagcggcagaggcacgagcggcgacagggccagcagagacaagccccttcgcatccgtccccttccgagcgagggcagcgtccgactagagactgcagcgacctcttgctcggacagctcgctcgacgacgacgtcccagcgacggctccggtcgaagggcgaacacgacgacccgtgtgtgggtgcgccgcgggtgccggcccagctgagccccaccagtgcggggggatagcaggcaggacccgtcccctccttcgccccgcccaagggcccgacccatcatccccggacgggcctggccgggacgcttccaggtggctcgaggaggagaaggaagagcactcacttgggacgtagtggaagagggacgtggttcgagggacgggcgtcgtcgctttgcgcgaggcgggaaaccggcggcgcctgcagccggacgcgcacggccgagcgacgagccttcgccgcccgctgctgctgcccctgcaatcgtacgacagcccgagcgaggacttaacgacaggacatggttgccatcatacttgctggcgactgctgcaccctcagctgcttgcttctccgaagcgttcgaggctcgtgctggcgcaggacgctgcagcaagtctctcttggccggccgccgctcgctgcgcacgctttcctctgccgcctgtctcgcgctgccaaacgtcccgcaggccaagaaaattctgaaaggcggcttcgctgacgcgcgcgaggctcgggcgaagccgcggcgcgaggggggttcgacgacgagaattcaagttcatgtgtcgtcctcgagaacactgcagcaagcgggccgatcacagagttagaaggggccgtgcagtaagcgcgctctcgcaaaagggacgcacctgcgttcggaccgctgcgtcgacgggaaataggtcgaccactcgaacgagttgccgataaagctgcccgggttgaacacgtggcagccctcgtacgtgagctcgtaccgctcgtacttgtctgcgaggatgagctgaggagggttggcaggcgtcgtctgcaatcagcgtcggggtcggtgggtcgtcacgtcggcgcgcgacgtaccgcggtcggcatcgggtagagcctcagggcatggtcgaagtcccagagcgttggtcggatcgagagcggcagcggcgacagatggcattggtcgagaatcgtctggacgagctgcgaatgagtcgagatggcagaaggcagcagttgtcagcacgagcggcatccaagcggaggtcagggcgagaggaccgacgtatttcttcatgtcgacctcggcaccgggcccgcccttgagaccaatgaggttgcggagcatccggcccatcaggtcctcgcggtagatgacgatctcctggtcaaagtacttgatccggcacgggtttgagacgaaatgggccttgggcagccgggccttgaccttggagacaaacgaatcgggaatgtgtggccgtggcatcgtcgtcgaaccccaggggtcgagcggaccaggcacgaagaggaagtgcgacgtccgcgacagctgcgggaacgaggcaatgaggttggcgagactcgtaaagttctctgccgagagggcgagtagtgggcgggcgtcagcgctcgttccatcagagacaaagcgcttggggacgaaccggtgtacttggctagacctgccgccccgccgacagtacacgacttttgcgagaagttgccacaaaagacgaacgcgagtgggcggaacgtcgactcggcgtagacctcaaacatgcgtcggaggttgggcagcgtctttgggtggtcgagccagaggtccgagacgatgacgagcgagatgtgcgagtgcgaagcgacgagcggcgcgtagcgctcctgaataaagtggacaaaaagtcagtatcagctcgttcggcaaattcagtctgtgcagggactcgcttcgtccttcagcgaggtagcccctacgccaaggaagtcaacgtggccgtagagtgacctgcaggcgtggcggtcagtctctcccgctctttcgaatgacgagcgatttcgacgacgcaccgtgctaccgagcgcttttcactcggcggatgacccatctcgatgacgcggaggacctcttcgtccgtgtactcgccggcgatcagtacgagcgagccctcggtgaagagaccctcaccgggcgtctggcggtgggtcgcacagggttcagcactggcctaccgagcgataggaagtgaagggtctctggctcaccgcctcgtccatgtcgagcacaacccgcccgtctccatcttcaaggcacaacaggccctctgctgtccggccaagcatgccaaaaagcaggaaacgctgatttggtcggcccagcaggttcttgatcgagttgagctgcggcgagggtgaagcgcgccctggtcaggaggtcaaggatggcaaggatgctcgacgagacgatggaccttcatgtactcctctcgatcgtgccctccgagaacaggcggcgtgaaatgctcggagcggaggatgatctgcagcagtcaggaagcgtcagcttctgcagcgcgcccggtgctggcctcacggacgcacctggcggacgagcgcgcaacgctcccggaggaaggcagctcgcgcaataggagcggcagcgatcgcaggcttatgtggcaagctgtagtagtgaggcacgggacatcagctaatgctgtcgcaagaaggccagctcgagtgtcgcaggacgaacatctgccagacgcctcgaatgctgtcgaaccgcagcgccggcatgtcaaagctgtcgacgacccgaaagtgattttcgacgttgatctcgtctgatccctctgctaacctgtgggcacaaaggggcagcgcagaggtgcaggccgtcagtagttgtgttgccagggcggtcgaatgctggctgcgcggacccacgggtcctcgtcctctccgacctcggtctgaacgagagcaggggtgcgtcagctggcagcgctcgcctctcgcctcaaatacaagagagtgagagagccacaccttcagctgcagcgcatgataagccgcctcgatgccttgcatcgacacgagtggcgacgggtctgtcgagcgcaggtcggcaggcaggcttcagaggtcagctctggctcggccgcgacctcgttcgaccccgctgagcgcaccctctccacgcatgtactctcgtgcgagatggtcgcacgagtcagcccagtagtcttgttcaacctcatgctatcagaatgcgcgagcacaaggaggagacagtgcggtcagcgagagctctcagcgtcagggccagcgctacggcggcccgcagtcggagtccacgcacctcgaccaggatgcgctcgacaaaggcaaaggcctgcgacggaagcgtgagcgagtgcttggtcgtaaagatctgcgcgcacaaaggaggacctgatcagcagagggtccggcgcagagaggcagtctctactggagctcgcgacgagctcaactcgcgagcggtggcagcgtaccttgaagatggtgcgctgcggccaggagtatgatggagcaggcgggggaggacagtggagcggcggaggggggtattgagcataatcctaccttcaccagccgtgtcgtctcggtcagcccggcgtcagcaatagcttggcttgaagagtgccttctgatcaagggacgtacctccttcggcccaagttcggccagcgccgtgggctgcgctgcgcttcatcgctcgacaggcagacctcgttcagccctcgaccttcatcacaccctgtcacgacctcgaagatctgtctcgacctttctttccttctcatcgctagacaccgccgactgcgagaggatgcatcccgacttcagcgaccgcccggccgcgcctgccaacagagctgcagtcgacggcgccgagctcatccttgtcgaccctccgaatggcccctttcaagcccggctcagtccttcctccagcttgaacccgctcaagagcccgaccgcaggtttctcgacacctttgcaaacagcttcaagctgtggattgagcggaggacaatataagcgggcggaaggcggcccttcgtcgctcacccgagggttgctcgtctcaccgcctctaaccgacggtacgtcctgctcttcccctcccatctgcacgacgttcaaagcaatgccttctcgaagatcgctcgtggcatcaagctctcgctgacgttcatcctcctgctgtccctctacccctagtccaccttccactgcccgccaacccctctcttcccctcccgccatcgcccttcgcccccgtccccgcctcagccgttaccttcacacccggctccttctggcgcgcaaagcagcgcctcattgcagtgtcaaccctgccagccatctgggagcagcttgtccagacgaagtgcgtccggccggcgatcaaaaggagggcggcgaaggccgacacgctgcgcagctccatcgcttccgcacgagatcgctgacccctcctttttcgcccgaccgcaggcggattgagtacctcaagggcacgtggaaagagggcctgccattcaagccgcagaaatgggacgaatcggacgtgaccaaatttatcgaggctgcgtcaggcgcgctcgctcacgaccgtttgtcgcaccctcgcgctctcgaaccagaagaaagacattgcctgacgctctcttctccgtccagcgcccaatgccgtcttcctccggtcgtgtatcgagcaagcgctcgacaacctcctctcagcccagcagcccgatggctacctcaacgcctttgtcatctcggttctcgggcccgacaagcgcttcaccaacctccgcgacctccacgagttatacaacctcggccacctggttgaggcgacggtcgcttactctgcgctcccggacgcgaggccagagctcctgtctgccgtcaagcagtatctcgcgctggtcgaacgcgagctgggtgaggatgcggacgggccagggaggggagcttaccctggccatcaggagctggagctggcgctcatcaagctcgtggagagcgggttgggcgatgccgacgacgagaagcgctggttgaggcttgcccagggattcatcgaacagcgcgggcggggagggggagtcggctctggggctgatggcgaagcggacgacactgacgacgacgacgacgacgacgacgacgacgacgactggttggcggtcgaacggccgaccgatctcaaggaccacgtcgcacctcggcggaaggcgggcgatctctacttcgattgggtgcctacctgctactctccctctcctctgctcatacctgcggctgacccttcatgccactcgccaggagctccgacgtcaaggcggtgatcccttcagggatccgagcttctggggcatcccttggcacgacgcgtacttttacatgcaggccgacctgtcgatccggaatcagaaggccgtccgcgggcacgccgttcgcgtcgtctgtgagtccgcccaagatcccttgatgaagatgctcctgacccttattcctttgcgacgtctccagattggctgactgcagcaaccgatctcgcaaggcatacgaaggacgcctccctgctcaacgccgtccacgcgctttgggccgacatggcgcgcaagacgtacgtcacaggcggcatcggcgccgacccggcgacggaaggcttcagcgacctgccctgtacgtccttcactccttttgcctgctcgcgagcgcacagcgttcatccgctctcccgcgggcggtcgcagaccacctgccaaacgagcccggagcgatctacgccgagacctgcgccgcgatcggtgtcgtgtttctcgcgcaccggctgctccagctcaacatcgatggcacgtttgccgaccggatcgaatggacgctctggaacgccgtcctctgcggcatctcggccgatggccggcgcttcttctacgacaacccgctcgaagttcacggcaacaagacgacgaagcgtgcagagtggttcgtgcgactgttttcatgagatcctctttgaccctattgctgaacctctcgtcttcctgcaggttcacctgctcgtgctgcccgcccaacgtctcccgcttactctcgaccctcggcgcttacgtctgctctgcttccacccaatcggaggcaatcaccctcgccgtccatcagtttatctcctgcgaggtcgcactcaacgcgtacggctttccgggcggaaagctggtcatcgagactggctttccgcaccaaggcgaggtcgcgatccgggttacaggctgcgagggtcgagcggttagcctcaagctacgtgtgcccgcgtgggccgggaccgactggacggtgcggccatgccattgtctcttccgacgtgactcctggtgcagcgctcggccagccgcgacagcccgaatcagcgcgacgccctgtcgttcgagacggctgacgacccaccctcccgtcgcagatctcggtcgacggctcctcgctcgccaaaccgaccgtcaccgacggctacctgactctggctcccagcgagcgactcgcactcggctctaccgtcctactctcatttgaccttcgcacaaaggcaattctctcgcacccgctcgtctcggccaacacgaaccggctcgcattccatcgaggcccgctcctgctcgcgcttgagtcggccgacaaccgcgaggtcgacctgcgagccctccgtgtgcgcactccgacggagatgagtgaggcccgggtcggcgtaacggaagagggtttgctcaaagtcacgctgcctggctcgcgcatcgtcatcgaagatggcgagcagcggtcaaagaagtgcgacctccgcctgatcccctaccacgactggggcaaccgagggctgggcgacctgatggtctggctcccgaaggagggtgcaggcggcgcttgaatccgcatgccctctgccctctcgagacaacagcagcaagcgcgacagaagatcattcggatcaagagaggtcaggtacagggcagaagtcgggttgggtcgagggtcggtcaggagcgccggccgagtcgtcaggcggtcagaagcgttttgctgtccgtcaggatgagcgctcgcgacggtgagcttgacgtgagcgcgtgatttctccagggtctgccggtgcgaagcaaggaggggtcaacatcggtcgcgaaagggaacaggtgaaccaaagcgactcacaagcgactgcatttgaaccgcgcggggtgagcgagcgcacgatcgagagtagagattggggaaggcgagagggcgagccgagaagagagggggtcatgctaggcgtgtcaggtggtaagatcggcagatgtcgaccggcgtgttcggaggttaggctggaggggggaggcagaggccgatcaggagaagacgagggtcagatcagtcgctggccagagcctcgagccgctgctccatgatgcgagcgcgagcgaagcacagtgtcgcgccgagcgcaatcgagtggacgtttagcgctccgcaaagaggcgtcgagacttacgttgggataagtctcgcgggactcaaggcgcagggcctccaacgccagcacctccgccgccggcagcggccaagctcgcgtaatagctctcgtacgcgctcggctggactccaccgccaaggggcgcagcgttggcgccgttcgaaggcgagccctgcggaggctgctgctgctgctgcgagtttggccacggcgaagcaggagcgtgcacgccccacgggttggcgccggccggaggggcctgctgctgctgttgctgctggccgtgctggccccacgggttgggcccgccgggaccgccaggtcctccctggttcgggccgccgtagccctgctgctgctggaagccgccgggaccgccgcccatcgggcctccgtagccgccaggtccggcgaagccagggccgccaaagccggggccgccgccgccgcccatgggaccgttgaagccgccgccgccgaactggccaggagggccacccatggccatgcgctggttctggaagaggatcaaggagcgcgccagaggtcagcacgaatggaaaaggcagaggctagagagagtaacgcaccggcgtgatccagttggcagggtcgcgccagggcgcaagccgcggctcctgattaacgggcgggccaggagccgcgccaggcccaccgccagcagcccagggcggggccgtcgcaccgccaggcgccgccggaccgccaggccctcctgcgccgccaggaccctcgatcatgccgacagccgcgccctgacggacaccgccgccctcgccgagctccgacatgaggttcgcgtactcggcgtcaaagacgccgcccggtccgggcgggccgccagggccgccacgcatcggccctccgccgcgcggagcctggcagtcgcgcgccatgtggccctgcgagccacagttgtggcagatgatattggccgcgtagttgcgctgctcggggcagtcccatttctgcaaagagtgtgcaaggcggtcagcgactgcatgaggaagagggccaagcgcatgtggctcagacgcaccttgtggccgaggttgccgcagttttggcagacctggttctcgtcgtcgcgaagcgtgccgtttagggcagcgagctcacgaagctggttgcgcttgtggtcgttctgggcttcgggcagcgaggcggcctatagagagtgaagaacgcagggcgtcagtgaagaaaatgggcagtgcaagggccgcctgcgagggcgtaccgtcgcgatgacgttgttgatgagctcgacgcagtgcttgacctgctcctcggtgtcaccggtgacgaggcagtggaggtcgtcctcggcatcgtcgctgaacgtgtcgggccggcccttgccgcttttgaccgagcccttgccacggatcgagattttggcacccgagtcgcgctccatgcccttgagcgtgttgccgcgcgggccgacgagcaggccaaagaacttgatctcggggaactctttgacggggatgtagaccttgtccgtcggctggcgcgagcgcttggtcgagtggtactcgttcggcggccgataggccgggtcgagcttgagtgcccggtcgacgagcttgacgcgctcgtcttcgagcttgcgccggtagcggacctcgcgcgtgtttgtccgccggccgtgggcgtcgtacgtcggcggcggcgagggcgaccgctggtggtccggcgggacaatgtcgttgagccggagcttcgtgttgatctcttcgatccgcatccgggtcgcgtactggtcgagctccttctgcgagacgttggtgttcgagatgatggccggcgccggtgcgcccgagccggcgggggcactgtcgccccagcgcgagcgccgcttgcgaggggcgtctgcacaggcgaggaaggtcagcccacccggtcagcagggaagtacgactgcgaagcagaagaggggcgacgcaccagggtcatcatgtccctcgccttcgcgctcccgcttgatgtccatcggaggcggcggcggcaggctcggtccaccccggccacggtcatcaaagccgctagaaggagggcccggccggccgcgatcctcgtagccaccgcggccacggtcgtcgtagccgccgccgccgccgcctcctcctccccgaggcgggccatcccggtcgtaaccacctgggccaccgccaccgccgtgcgaaggaggccctccgcggtcaaagccgccccgaggcgggccgtagccgccgccaccaccacctccgggaggaggaggagggccgtacgagtcgccgccgcgggaaggagggccgtagccgccgccgccgggcccttgagtcggaggagggaggctgtagcctgaccggcggtcgtcgtgtccgccaccggacgacggaggcggctgaggagctgaaggacgccacattgccgctaagggaggaagatgaggtcgagggaggagggcgaaggcgaggaaaaaaggccttggcccaagcgggcggcgcgcgcgcgcgcagggacgcgaggttgggcgcgactcctcctcaagcacgtcgacctgccagcagccttcctctctctctgcctcggcccgcccatctcctaaaggcaaggatgctactctcgcgactctcggcggcgagcctcattcgcttgctcgaggtcgccggcgagggctcgctgttcgacgtcgagctcccagcctcaccgggcacgctccagcaagcccgcgtcagcgcgacgtgagtgcctcatctcgcaccttacaagcatggagaggctaactcgtctccgcagaatcgacatcaccacgcacaacctgcgatactggcttgcagacgctgtcgcgggcgactcttggcggcagccgccacgaccatgtccgtgcccgcggcccgctgcgcctggccttgcttccccgctgactcgcgctctgcctctgccagccgccacgccaacagcatcgagcagccagcgcctgacacgccgctccttgcgacgcgtcgactcgtcatcggaccacggctgcgacagcgacagcgcagagcctgacattgcctcggtcgctgtcagcgatcgtgcatccgacgaccacagcctggccgactttgtcgagcacgacacggcctcggaatcggacgagccgctcgtcgcgcttgtcgggcgaggaggcttgcggccgtcgggcgctgccgctccctcctcgtcgtccaagaaaaaggctcgggcgtcctcctcggcgaacgaaaagccgacatgggcgcgtcgttcaacgtcggcgaggagctggcggacgtcggcatcggtcgtgcgtggctcgcttgacgttggcgccatggttcctgctatcgacaggatagggcgcctgccgtctgatgacgacgaagaggacgagggcgagggcattccggcagccaagaagcggccgcgagcgacaccgaagaagacggcgcgcaagtcgtcttcaaagcgctctggccactcgccgtcgcggtcgccctcggccggggactcgagcccgaacctcgagcatggcacttgggccgacatagctcggctcgaagaggacgacgagcggccgccgactgtctttggcctgatccccttctcgcccgagcccgagggcgggaaggacgccgtcatggacaacgtcgacgagctggccggcagcgaatgtccacaaggtccaagcctgagaccaagcgagcccgaccggcagctcagtgtcatgtcggtccggtcggaggtctcgccggtcaagtcggaggtcgaggaggctgccatccctccgccaagggtcgtcaccgcgcgcagctctatcaaggccgagcggatgtcgccctctgtcttgtttagcccagactcgcctccaccggcaccgctaccggtcgtcaaggcgccgcgctcgcggtcgtccagcccggcgtcagacacgtcgtccgacccggccggcctcagcgccctcgtcccctcgccgcgccagtcggcctcgatgacggtcgaacctcctgtcgcccagcggggctctgtcgagtcgctgctcgaccggctagcgcaaagttcgactccgttcttcgttccctcatcgcagccaccgcgtccgcagcccacgtcggtctggtcgcacgaggctgcgcagaacgaggcctcgaccagtcggcagccggcacttttgcctccccgggccacgaaggcgcactttcgcgtcatcgcgccaccgccatcagacagcgagactgcctcgttgaacgtgacgacacccgtaccgccaacgtcagtctcgcgggtcggcagcgaagcagttacaccgccgctcacggcatctgcgccggccgaggagcgaacgtccaaaaagcgctcgagggacgagtcggtcgacgccgacgaggctgccgtcaccgcaaagcgtgaggatcttaccggcgaggtgccctctgggccgagcgctgaggagcgagctcaggtcaaggctggaaagaaggcccgcaaggccgagcgggccatccggcgcgagacgaagcggcagaaacaagaggtcgcggccgtaccgtcagaggccagcgtgcggcccttgcccgagtcgccaccctcctcgccgtcgaccgacccggcctccgcttcgactgccgaccggacggcactcgtccggtcaaagcttcagcagtgggtcggtgtccggacccagcctgaaaaggtcggccgggctatcatcgcctggctcggcgagtatcctatgagcggcctccggatgctgctcctaaaggagctctttacccagctgctcgacctcaacgtcgtcaaggcccggccactctgctggtccgtcatttgtctctcggagcagacgcccggtctcctcacggacccgccgcgcaactcgttccagcgctggctgctgcaggacatacgcgaggccgaccggacgctctatacgtcccgcatccccatctactcggagctctttgccctcaatccgccctacagctataagacgtgcctcgaccagcacctcgccaggctgacgagaccctcggcgccggatgcagccgacctcgaggccttccggacgctcctcgcgacccggctgaccgcgctcgagaagtacgacctgctcgcgccagcctttctcaagctgagggccctcgccgcctcaccccatctcgcacccgacgctcggaccgcgctcgagaggctgctcctgctcgacccgcgccgaccgccagctccaaagccgccagctccgatcggctcggacgagcggagtgtcgtcatccggcgttgcctcgacaagctcgacgagctcgacgagcggcgcgaaggaaagctgaagaggcacgcccagcgcgtctccaaagcgctgatgggctggctcaaggacgcccatcgcccgctgcatgcgccccaggcgcccgagacggcctgcctcgtgacgcttgcgctcgaccgcgcccaccgcttcttcctcgggccagaagtgaccagaatatttttcaagtgggccagcctcggcgtccacaaggctgtctgcgacgccattgtcacgtccgaccaggcgagctatacgtccaggatccccgtctttgccaagatgctagcggcgacaaagaacggcgccttcgcaaaggcctacgtcgacggccacctccgccggctcctcttttacccgcggccgccgcaggacgttatcgccaacctgatcgacgtcgtccggccggccggcgctgcgctcgataagaacgggctgctcgacgacgtctttgctgcctttcgcaagcttcgcgacgaggacaagctcgacattggcggcaagatgctcattaacgacctgatctaccttcgcaagtcgaactggaagactgtcccccgctgaagcggcgtgctcgaggtgcgcgctgcctcgtccggcgtacgcttgccgggatcaaggctgactctgctacatccagtcttctcctcccgcatctgccctcgaaccctatcatctcttcctcttcatcgcacgccccctctcaaccgccccgacatcgggtctttcctgccgttgaccgcccgcccgtctattgctggccactcgacccgctctccgcactttctctctcacgatactcacgcccccgtatgacgaccctctcgctgcatcatcatgacccttcccaccgacggcctcggctcgtctgctgacttgcggcgcaagagcaggtggccgacgctcgctcgcgagtatgtgtggactcgagagtcggccgccgctgaccgtggcacccgcccctgcttgcatagcaggcgcgggacaaccctccttcttccagttccgcgggtctcgttcccggccaggatcctatgcgtctctccatgcgtccctcctgtgccgtgcgagagcgggtcagagtgtccaggcggggttgacagcgtgagaaccagctcagcagcagcagcggcagcaagagcctggtgcgcgcgcactgtccccccctttgacgtccgtcgacccttcgcctctccgacctcttcctgataagccgagcgagctttccggctcacattgtcagctgctatgtcgtcgcgctctcccgtcctcctgtctggcatctctcgtccggcgatcctccgcctgctcgacgcggcagccagcgacggcgcctactttgacgtcgagctcccgtcgtcgctcggctcgctcaagtaggctcgcatcagcgcgacgtgcgtcgggccctcgctcactgtagcagcagcaccagctccagcagctgaccgtgctgtactctcgctccctcggacatcggtgagcggagcaacaagtacgtcgtagagctcaatcagttccagctgctttgacgctgacctgatcttcggtcctcgatcgcatgcgtcactagaacgtcgtattctctggacgaaagagcggcagagtcgctcgtcgacagcatctgcgacaaccccgacaagaagaagcggcggatcgtaaactcgatccgaatcctccactggctcctgagccgccgaccagagcaccgaccgcatctccttagggtggtgtttgatcggctgctcgagcggcagccgcttttcctcccgattctgttcgcgaacatcgtttttcgggccagtcccccttcggacggacccgattcgagtgaggctctcaaggaaaaccggcccgagctgcagctgtcggcgtcgagcgccttcctcgacctggccaacacctttctagcgtgggccgcaagcttgatgtagaaggaagccgacgaccgctccagtcttcgcataccggtctatcgagccttgctcaagccctggtcttcgtctggcgaatcactcgaccggcatctcacccggctcagccatcctccaacgctcgatcctccaacgctcgatcctccaacgctcgatcctccaacgctcgaaaacgccgagcgctgcaggacgcccctcagcaaagatggcaagaaggcgctcaagaaccataccattgaccggtccaaccgcaagaggatccgatctttcgcgtttgaccctgaccccgacatgcccaggcgggtgaaggaggtttttgccagtctcttttagtagaaggggaagccgacttccgcatgaagcttgtcgctcccaatcccgtcgcctgcccttgcagtcgcaagcgcacgctcattgcgttaatccgcgcgaacgagggagaaggacgggtgcgtatagacccgtcgagtgttgaaacaggacccggaggagcgagacgctactgacttgagacgagggctagacggatggggtacaataaagggcggagagattgacagggaatggagagctgttcaacggggcccatccggtccacctccaggaccaaaacgaacaaggcgagccgccagtcgctcggggagagcgccgcagtcgcaacagggtggccggcgggtcgatatcacaggaccaccttggaccccatcatcggaccatcgttcgctcgcgcatcctctttcactcctctcctctcttccttctcggacaagatagcaggtcagcgagcagtcgtcggcccactacgccagttagaacagagtcaactgcataagctgcgagctgggcgaagcaggaacgtacgtgcggctcaagttcgagtccgtcagcttggcctgctccttttcgataatcggcagcgggtcgctcccatacgcgacggcgtgaggacgctctacgcccctcgacggccaatggactcggtcaaagaaaagggggcggcgacggcggcggtcctcgtcagcctgtcttgcaggccctcgcatgaaccttgagcgcgctagtgagactctgccatgagagagacagcaacctcaagtgccggcgggccaggcaagcagtcgtaaatggctctttttcattcgagaatcgagcaagagacgggccgcccctttcccgcgcgaatgagtgacaactttcccttcgcccacccctcccgccgccgccgtcgtccacctctcacatcgtcttcgtcttcttggacttttcaaaccagccgagctcggcctcgcgcgcccttcgccaggcgttacctcggacgaccgactggtagacgcgtttggcgtaggtttcgagggggagaaacatgccgacacggcgttggtaggccgagcggtagagggggtacttccgcgaggtgatgtattcggttagggcgcttgttggcaggcggatgagggggggtggtcagcatgggggagaggtggatggaggggggtgagaggtgcgaggggcgaggtgtcggctcgaggcggcgcgaatctgcctgtggtcttgcatcaaggctgaaccgagcttccttccgaacgcatacagaaaggggcagccacgaagcgacgacgctccgccaaggtagagacagaggacgagcaccagggcgggcacgaggatgggcatattcataaggcgaaggcagtccacctccctctacagcagcctcagtaacgctcccgggcctgcgcgggtcagaagcacaaattcagcctcgccgctcaccgcagggcaaaggtgcgaggttggcatcgttagaggacagcagcggcctatgccacagcaacagacgtggcgcattgagggacgcaccgagtccattgcaccctgggcgtacgagcctccgcggttaacaccagacgcacccccttgcggagcggcggccggtcggctggcagcgccgaggccggcccgggctgcccgcagctgcgtctcgaccgggtcaacccgcccctcgccttggaggccgagcccctggccttgcgtccagcccatcttggcgagcagcttgttgccgacgttgtctgcgtcctcagccggcgccaggaccggctcgggtggcggcgcaacgggttccggcgccgggccctcgacaaacttgcgcttcggctgggggaagccagccgatgatgaagaggcgtggcccgagaccttgtcgggctggttgaaggcgacgcggcgttcggccgctcgatcgcggtactcggacgcttgagcggccgtcgctaccgccacccgttcggcggccagctggcggagcggcgcgtcaaggagattgcgctgcgggaagggggaggggggaggggagaaagcaaggaccagatggtcgacgtcgcaaggttcaagaaaaagagtagcgcgtggcaacaaagaagggagcatccgagttgtggtcagcacgtcacgctcaatcgtcgttgacgttcagccggccgggggcggtctggagggagggggaccttgtgcagatccgacgcgacattgtgcttgcggaggaggtcgagcgacttgagctgccgctggcacagcaggcaggccgtcttcttaacgtccgagaactcgaactcgtccgcggcgtcgtcctttgctgccgaaggcgtcgtcgctggtactgcggccggggcgacttggggcggcggaacggcgacggcagccggggtctcggccgtcttctggcgggaccaagagccggaatcggacagatcaagaaggtcaagtccaggcatacaggtgagcatttctggtcaacgtcgaggcaagggccgcgactcggtctcggtcgaggacgaaggagggaaaggcgaaatacggtttgaaaggcccgcggctggtggtggtgcgcgagaaccgtgttggccgccgaaggctggaagccgccgtggcccgagtttgaagggccggcctgcgagtccgagacgtcggcgagctctttctgggtcgtgttccacttgctgatgctcgtcgccaccttgcgcgaggccgccatcggaggcaccttgtagagcttgcctgaggaagaaaaaagcagaacaggtcagcgcgcatgaacaaccggacgacatgagcgagcccgctccaacctttgaccggaagcgtcgacttcgcgccctcgccgccctcgtcgtccgagtcgtcggcccgcgcgccaaagaccgagctggcagccttgtcggccttggccggcttgccgccgccgccgaatttaatcgcgataggcatcatggcgtccttctcgagccgcctcagcatgccctttgcctcggccgccgggtcggcaggctccttcgatgttgcgagcgccattgcgggcgttcctgcgtgtctgctgctcttcttcgtagccgagcgagcgagagcagcggtctcgagctcacgctggtcgccctcttgccagcccgtcgcccactggcaccgaagcagcgcctgctcgtcccagtaccgaacgctgacgtccgaaggcaggtcgccgagcccgccagggccgccggcggggatcgtctgagctgcctctgacgaatcggtcgatggggcgggcacgtgtggtacaaaggagagggccgaggcgaaagtgaccgagacgggcttcgacgagggcgggaaggtgaagccctgcgggtgggccgtcgccgacatgatgtgagcgagcagcgcgcgcgccgcctgcaaggtgcgccagcgtatcagtcagctgaggctgagagattgctcgcatgtgggcgagatcgtacctcaatcgaccgaagctcgacaaagccgaagccccagctgctgccgccctgctccttgccgacaaggccgacgacgcggcgcactgtcccgctcgttgcctcgacctcctcgagcttgtggaggacatcgctccacctcgtcttgccgtctacgccccggagcaggagaatccggccgccaccgctcgcgcccgtcgcaatgtcgcgcatgccgtcgttggcctcgcctgcgagaccggacgggccgctccaggcagatgtcggccgagtagacggagcgccggtcgtcgacgagtagtcgaccttgaccctgcgaggcggggcgttgccgaacggcaggagcacttgggggtggctggcatcgatgaagcgggccgagtcctcaagcgacttgaagagtgcgaagccaaagcctttcgacaggcctggcgggaccaaggaagcggtcagtcgggcggacaggaagcgaggtgtcgacattgacggctaccgcacctgttgccttgtcgcggatgatcgtcgtgctctcgacctcggagccagagacggccagaaagttgaacagctgccgggcagaggcgacagtatcagccgagcgctctccagcagcgggctgagcgaagacaagaagtcgtacatccgtctcctccatgtcggggtcgaggccgaggaagatgacatgtttcgatggctcggatggtggtcgctggtagggcggggggtgagacggcggctcgccagagctgactggaatgctctccggtcggcgctcgtgagaccggccggcagcgtcgtcgtatgtcgcttgagcgtcgtagccggacgaggtagcctacgagcaaagagcatggtcagatgcgtggttagatgaggccagcccgaccgagaaccagaagccagcagtctcgcacctgacgcgacgccggtagttcgtagctgtcgtgccgatcgtgaggccaccggccgtcggcaccttgatcatctcgttcgtgagagccgccctgctcaccctgccagggcactggcggcaggttggactggtcgtaggctgcctgcggtccatcatcacgccagcctcgaccgctgtcggccggcccggggcggcgcccgccgtaccagtcgtcgctcgggcgttgctcatagtgcggctgattaggttgagggtaggtagcagcatggtggtctgtcgaccggcgcacctcccaggactggccgccataccgctgctgctgctgctgctgctgctgctggtcataggcctcgtgcgacggcaggccggcagcacgccagcgtgggtcatgggccgaccacgcccttgcagactctggcgcctgacggtcctcgcgccgccaagactcgccaccaccagaccagcggtcgtcgtacgaggtcggttccgtctgctggcgtccgtactgctcctcgccgccgtcgtaaggcagggcgtcggtaaccgaggacgaggaggctgctgccgggttgggatgctcccaggaggtcggccagtcacgcgtcctcggccggttggaagccgcagaccggcccggcgaacgcgagcgtgaccgagatggttccatgacgtgtcaaggggtctgtcgagcagtaagaagagagtgggaagatgcgacgaatgggtgacggaggttgaggggaggaggaggagcgcctcccacgccggcagacgacggcccaaaggaggtcgtcgggcagatgctccgcccgtccgcctctctcgcctccctcatcctcaatcctcgagctgcacgaactcatcgtctggatacctgtctggccctgctcagctagtcgctcctcagaaggatcagtaggcctggggaccgtctgtcgtgcggggagcggtcagctttcctcccgcgcagccagcctcagcccaggcggttccctccgacggaactctcacgcactcttgcgtcttccgccgtcgttcgacgtcttcccttctagcctcggaggacgctccggccgtccccgtcaccgtcccctctggccgcgactactaggtcgctggcccttcctcttctctggccgctgaccatcaccccatcaactcaacctgctgcccacgaagcccacctccaacttcagaccctcagaaccacccttcttcatcaacctccttcacaagcctcgcttccagcctctcttctagccctgccatgattctctcaatcgccacttcgtcccacttgggccttctgcacgacctcgagagcctcgtacgtccggcgtagcgtcctctcgccgttaagaatcgagctaaccgacggcccctcctcgcccccccttcagttcaaccgctcgaaacggtcaacgtcatcctccgacccgagggccacttcagtcgcctctcccagccttcgaggctccggctcgcgcgtcgcagtcaacctgccgcggcagcccgtaaggaaggaccagcacgaggacgtctgcacctgcaccatcccagttcatcggccggcgacgccaacctcgccttgagatctgcccctacgacactggcggacgggctcagatgctatgggcggaggtcgcccgcccgtcttggcagccgagccctcttccctttcctccttccgctgccttttacgtgcgtggcgctgcttgggatctccgtcatccgctcgcatcgcgctgacaccctcccagcccgcctgctgccaccagacactgtaccatctgctctccgactcttcctttgacacgctcccggccatactttgacttctctgactacttctccctcacacgaccctctcacgacgatatatgcctcattcttgtcccgcccttcttgcctttcagctctgcgtgcgactataaaaggatgcctctccgacatcagacgtctgttcgacgctcattggaggcaggagggctcgacgtggacagcgacagcgaatacacacgcccggccggtcgtcttgcgcgcaggccgcgtcccttcgcctctcgcggccatcgagagatcgtcccgcagctgctcctgaacctcattctcccccttaggcccttctgcagtctgcctctggctctgctacacccaggcctgagcatcggaacgcccggacctcgatctcaagcccgagccagtccggacggccgccctcctggaacccatctctgctcgctgcggtgatcacggtcgacctctcggctcctctccggccggcttcctctccgaagccatgacggaccgaccatcgatggctgccccacagataccgctatcgttgtcgacaccgctcatccctcttctttcgcacccagccctccggtcgacctcgctcgggccgaatcacctgccaaatctcgccgctcttctccgaccgttcacgagctcgttcgctaccgccggggctagctcgagctcgctggcagcctcgggcttgctagccgctcggtctctcaaccttcagacggtagccctgcccggctgggggctcaggatcgtcgactttgacgagtgggtggccagcggtcaggccacgccaggcgaggaggaggtcgccgacgccctcggatcggctctcggccgcctggccgagggcgacggtcagtcagatcggccgacactggccaacagcggcgacggcctagcctggagaacgatggccggcctcatggatgtgacacggcccgaagtcagctgggagacatttagccatcccttggcgagtgcgtaccctcgttatccctgcagtcgcctgcagacagcggagaccctcggccaggatgctgactccctggtacacgatcgcagtgatcatcgccatcccctcgacgctccacgagccgctcgtcgagctctcgcagctgtttgcccggtcgcgcgcaaaggagcgcttcgcagcccggccgtggcaatctgaggagctgctccgattcatcgtcattgtgcatgatcagggctcgccgctcggctcgctcgaggggtgggtcgtgtctcttgtaatgacgatccacggcgtttcgctcgcttggctgacgtccctgacgttcttgtgctctccagtgcgcagcgcatgctcgagagcatcaagaagacttacggcccgcatgcttctctgctcgcgatcaactcgctctcgtcccccctcccgccatcaccgttcctccacgagacctacgcgagtcagccctccccagatccggttcgagcgctactcgatccgagtgcaggccgcaggacgagccttcgcgcggagggccttgacgaaggggacggcccgcagggcgaggagggcatcgagaccggtagacggctctctgagacgggcaacaacgagaacgatgagctcgaggccggtatcctgccggacggtctgagccatccgctagcggagaccgcggaggaaggccctctggccgctctgacgagtcctcagcgcaactcgaagctccttggcggccggctgaccgaggacgacgtcgtcgccatcaagagcttcctcaaagagttctcgggcggcagcctgatcccgtatatggagcgcatggtctccggcttcaacgagactgtgggtccggctcgaagtgtcgctctcaaacgcttgctgaccactcctcgcgccaacagttcaacagtacgcgcaagggcatcaccggccggctctttggtgccggtcgcaagctatggggtggcggcgacagcagaccgagcagccccggcctcggcggtgtcggctacaacgccatccgcggcttgtgagtcgcgtctgagccgtggatgacgtccgctgctggctcgctgatcgtcctggctctccttctctttcaaacagctacccgcatcacgcgcccgaggcgacgaaccggcgccttgccgatctcgcctttctgcttcgcgactacaagtacgcggcgagcatctatgatggcattcgcaaggactacgttagcgacaaggcgtcgatgtacgtcgccggggcctccgagatgctcggcctctccctcctgctcgcctcggccggctcggcgacgtcggctcagctgcccctgatcgagtcctacttcgactcggccctggccacctttgtcgcctcgcccctccctcagctggcgtccgtccgcatggcggtcgcctaccgatcgctcctcacagagacggccagcttccgcgctgcgagtcatgtgctcatcggcgcggccggcgaagcagaggaggtttgggcagccgtcctcctccaagaggctgccgaggttgagggcgaggtcgagaagctcggccgagccggcaagggcagggcgcggcgacaggctggcaattgggtcgaggcggccaggaggtttgagatctgcggcttggtgcggctgttctcccccctgcgaggctcgaagtcgcacatctggctgacctgatcccatttcactgtgccccctcttcagaagtccttctcgactcgctgcctcgagaaggcgctcgtcgtttaccgcgcctcaacctggacccaggcccagttctttgtcgaacacgcgctcggacgccaggcgtacacaatgggccggtctgatgtcgctgtcgagcactttatccggctgctcggcctcgccgagggccagtcaggcggctggctagacgactttgcgcttgcgttccaggtgcgtacgggatcggtcggctcgcatgaagccaaggagcaggttcagctgactgctgcccggggcaacgtcgacaacagcacctggcgacaaaccacccggacaagactgcgacgcttccggccgagctccctcggcccctcttcaacgtcaagcggacggccatccgttcggcgcacggccaggctgcgcttcaccgcgcggatcttcagtgggccgccctcgaggacgagtaccttcgtctgagctccttcccaggaggccggagaccggaagccctggtcagcgaggaggtaaacgtcgtctctgcggaaggtgcatcttcccccccccctgcgttgcctcgctcgtccatcgtcgaaggcaaacgctgacgtcgttatattgcgtagagccgttccacgtcgtcctcgagatctcgaacccgctcgacaccgagctccgcctcggccagctgactgtcggcggcgactgggcagagtcgtctctggccgcacccgaggtggctgtcgttgacgaggttgttcttgagccgcgcgagacgagagaagtgcggccgatacgcaagaatttaggtggccggaccgtccgacggctgacgcgtttcccctcattgccggcggcagatctccatccggatcgtcgcttcggccgaaacgtcgagtctgacggtcaactcggtctcgttcctcttccacaatctctttgccattcgacagtcgctcgtacggcgcggcgagcgcctccacgcgacaaaggcccagcgcttgacgccgacgtacgccgcggaccgctcgctgacggtcagcgtccaggcaaagaggccgagtctcgtcctcgagacgggcgcccttccgtccgtcatggcgcaaggcgagactcggcgagtggcggtcgtcctgcgaaatgccggaggcgcgacggcccgctccgtcagcctgctgtcgggcggcgatggcctcgttcgggtcctcggcacggtcgccgaagcaggcacatcgacgactcgtgagcactgcctgttgatcgcccgctcgtctccgcactccgcattgctgatgatgcttaccctgtcccgccatcagccgtctacccgacatccagcaccgtcccagcagtgttcactattgccaacgagcttgcgacaatgatgcctgtgacgctcgacctacccggagatgggcttcgtccgggcgaggacgtgacgctcgagctgctcgtacacggctcagtccccggccaaggcgacctccgcttcctctgcgtctaccaggtttgtctctcggggatcctcgagtcggcttcaggcccggtgctgatcatggcccgatctacaggaggcggccgacggctcgtatttctcgtcgacggcctgtcaccagctcgagatcgtcccggtgctcgaggtctctgccaaccaccggccgagtgctgcgcggaccggccaccacctcgtctcaatggaggtgcgttggccctattgtcgttcttttgatcagaatttgatcgaggtgcccccaaaccgccacagttctcgtctctttccaccgagcctgtcctggtcacgggcgttcagatgctcagctccgcctgggaggcggtcgtgccgatgggcacaacgaggtgaggacgagtcgctaagccaccgggcgtcttgctaaaagacatctaatctgacttgagtctctgttgcccgcctgctcagtatcgcaactcattccgcgctgggcggatcgcagcggtcgtacctccagctcgcgccgcggtcagaggcgcccgcacccgaccggtccttcaccgcggctaagctccgccagctcctctctggctcgatcgactcgacctcacgaccaccgtcggtcgaactcaccacgacacctgactcagagacagagagcgaccgggtcgacttgacggacgcacacttgcagcccctcctcctggcccagctgtcgaccctccggcggacgactctcaaagcgcagtacccgttgatcccgcaggccgacctttcggccgtctttacgctgctcgagccgcgcgacattgtcctcgtcatcttctaccgcctccctggccgagcaggcttgcccgagggccaccttgtcatctcgggcctcagtccaggtccgagcgagagtctcttccttgacgacctcgctggcgcgagcgatgcaggctctgcaaagggcgtccggagcttgtttgagcagacggaccaggcgcgctgggcgctggccgagagcgtgctcgacggcccgctcgggcgcgaagacgaccccgtgcggctcgaggtgacgagcgagtcggacgccgtcgactgggattttaccgacgggtgcgtgccctttcctcggtcgatggtcgtcgtgacaagtgcactgacccgcttggcgtccgtctacgctggctccaggccgtgtcctctggctgtctcgtacacgctcacaaacacctcggctcgcctctctgcccgcgtcaatctgacgctcctcgcgcctgccccgttcgtccactgccgggctgacctcgtcgctcctccttctgctgcaagacgctgactatcttctttctcgctccagctcggttctcttcggtcctgccctccgcgccggccctctctcgctctgccagaccctcgccccgctcgcctcaacgacgctctcaagcaccgtgctcgcctgccggccaggcctcgccgaactcgaaggcagctggcgactcgccgtcgagacgggccaccatgtcacggctagcgaaggagagggagcgtgggccggccgccggacgtttgagcgggtgagaacggcagaaggcgaagggagggtcgtcggcgttcgggctgctcgggcaccggcgatggccaggagtgagcagccggtgaacgccttggaggcggtcgcggcgtgaggatgagggtgcctcagtatatcgacagacagtaaagactctcttccccagtttgcaggaggctcgagcaagaggaagggccatgtctatgcgcgccgcatcccccgtctaagaaagacccattctctcatgccttcttgtccggtggcggcgccgccgaccctaccttcccgtccttgccgtcggccgctgctgctgctgatgacgacgccgctgggggggcagtcgacgcggacgggtcgtcttcggcccgcgagttgacaagcttgttgtcgacgctgagcgggaggagggaaggcgagggtcgttccgtcagtcgaaagaagggttgaggaaggaagccagcagcctcgggcgcaggacgcacagattgtggagggcaatgacggagcggatgaggctcgagaggtaaacgacgagcatctggtcgtttgtcgcgcccctgaagctccggcccatgacgtcgtgctcgacccgagcctcgatgccggtcgccgacgccgagcccgtcaggccgcccgggaggaggttgaagacgtcttgaaggttgtagaggatctggtggttgacgggcagctcgcccgcgacgaccttcgagaggtacgtccggatgtcgacgagccgagcgtggaggcccttgagcgcagaaagctgcgaggcgacacgcgacgagagcgagccagaggacgagagcgggagtgcaatgtcgcgcaggaggtgctcgacgccaatctcctcggcctcctcggcctcgatcgacgaggggacgtgcgtgaaggtgcgggttgaggtcgttccgtcctgcagcgcggaaggagagaaggatgggagggcgggggcacacaacgcggacgaggcgtcggcgacaatccagtcaagagcgagagcgagttgcggccacgcaatggaacagcggagggaggcagaggggctcatgtcagcgactggaccaggtgtgagcaaccggctctgccctcccgacatcgctccctcgaggagagtgatgacgagagggaggcccaagggcgggctcggcaccggggtctcgctacaaggcggatctcaagcgggaagggcggacgcacgtccttgatctcgtcgacggcaaagtaggcatcggtcgggatcccggtgtcgccccggcctccagtcggtcggacgtcgacgatgaccatcacctggagcgtcggtgcaaggaagaggtcaggtgtgcaaccccctggccgggcaggccctcaccgccgccaacccgcctttagccgacggcggcaagcggcaagcgacacaagcaagagtataccacacgtaccggcttaggcacgaaccgcttgaacagctcagcgatctcgaggtcggagctccggagcgtcggccccgtgtggtagaagccgatcggccgctctcgcgcgttcaccttgcgaaacatctcccacatctgctcgacatagtcgaggtcgaggaaccaagtctttgcgtcggtcggatcctcctcaaacgggatcgcaaacgagttggcgacattgaccgtttggccatcgttctggccgaggaggacgccgagcacgcgcttctttgccgacgtcggcgagcgcgaggcgtggtcgacgaccgagaggaggacgagcggatggacaacaacgttggtcccggcgagcggagctgcagaggtcgaggcggtcgaggaggaggaggaggcggccatcttgcaagagtagaggaaggaggcgagatgtcgttggcgtcgtctcgagtcgtcgtccaggctggaggtgagccgcgcgcgagttacgctccgatgtaacggcgagttacgcggcggaagccgagcctcgcgcgcgcgcctctcctcgtctcgccctccctctccatttacgcaagctcagcatctctggcctggacttcacttcggtcctttggcagtcggtgccatcccttgaaacgctcgagttttcttccgatctgctggcgtttgagatgctcacgtcagacgcaatccgggcgcgcttgccgtcccggaaaactttccggaccctcgacaaggccttctcaaaccaggaggaatcaaaccaggaggaagagccgccccgctcgattgttgtccggttcggcggcccggctcgacgcctgcgaggcgcgaacgtccgcttcctcgactgcagaggccgggtctggcaggagagctgggatgcccttccggaggactcatctggtgcgtcttattgcggccacttcttcacctcacttccggaccggcacagacgcgctgtcgactcgtcatcacctccccttagtcccgactcaggacgcttgacttcctctctcccgcttcgctcgacggtcgggatgggtcgagtcgcgtcccggctctccgatgctgcccgctggaggacgggtttcgcctcggctacaagaaacgcccggcccattcctatgagatccttatgcgcttcacatgtccctttgcgtacacagccactctgcggtctgcctgaggtctctggtcgcgtcgacaactccttcggcggctgcgccttttgcagcccacgcgcgcgcgctcgcggcgcccatctgctgctgctcctccgcccgccgaaatcgccttgtggccgtccctcctaacctttggcgcaaccaccgtcctctcgaagcctctctcccgcgaacgagctgcctctctcgcttctgccgcggcttgctcgtcttctcctcttccggctctccttcgtcctcgcgcgggtcatgtcctcgctcgttggggtctggcgtcggctgccggcagccgcctcgctcctgatcggcatccttgtcggcctgcttgttgccaacgtgagtcgtcgagcctgtctttaagaccaggaaggccagagcattcaattgacctgcctccgtcgtatacagttcttctcgtcccgtcaggtgcgcacttcgtctctaggcaagtcgctcgctcgccctcagcccacacgcgccggcgaacgcgccggacggggcaagcgacgggtaccctctacgctcgtcggacctttagctaaacggtctgctctgacccgtctccaggcaccggatccgcagacttggtccggcggactcaccaagggctcgaagccgaacgttgtcggcggtcgagctgggcggacgccgcccgtcctgccgacgctcgaccagcggctccgaatcctccagctcgtctcgtcgctctcgccgcaccacacaaaggagtgcctgcggcactcgcagccgctgtttgtcgaccaggcgctcaagcgatacgagcccctctacggccagaaggggagctggcgcgacacgggcggtctctttggctggggcggctcaggcaccaagaagagcgcaaaggccggccacggctttgacggctcggccggcgacctcgagtcgcacgccggcaccgtcaagcgcgacctgtcgggccagaagcacaagtacttctttgccatcaacctgtacaactcgttcgacgtcatccccgacatctttgcgacgctcttccgagtcgccgcaatcctcggctaccacaacgtctacgtctcgatctacgagaacggctcgacagaccagacaaaggccctcctcaagatctttgacgccatcgccggcacggccggccttcgggtcgagatccggacctcgatgcgcacccgaggcaccttcaaccaccggatcgagtacctcgccgaggtccgtaacgccgcgctcgtcccgctccacgagcttcgcgagagcaagcaggaggtctttgactcgatcgtcttcatgaacgacattctgccgtgcgtcgacgacctgctcgagctcatctggcagtcgcgccggcagaatgccggcatcacgtgcgcgtccgactacatgttccacgaggacattgtgcgtctctccttttggcctttctcgaactccttacacgccttcgctgacaagcgctctcaccttcctcagggctcgcccgtcttctacgacaactgggtcgcgcgcgacatcaatggcaccgcgctcgagaacgcgcccttcgagcaggtcttccatcaccccgagtcatcgcggcgctttcaggaccacctgccgctgcaggtccagtcgtgctggaacggcattgccgtccttgacccggccccgttctacgcccaaccgcacgctcgcttccggatggccaacctcgccgcgggcgagtgctcggcctccgagtgctcgctcatttgcaacgactacaccaacgccggctacggccgcatcatgatggtccctcgtgtcaagctcgcgtatgataacgtccgtcccctcttgtctctatccgctcgagcctgtcacggctgacgcagcttccatccgcgcgcaccccgagcagaaagtttacagcatcatccacccggatcggcgcaacctcacggcaatccggggctaccgtcgcatcggtggcctgccggatgacccgcatactgacccgcaggaccggacgtggtgtacgtcgccccctcgctgcctctcgctctccacctttgcgggcctgctgaccatcgcccttctcactggttcaccgcagacggcccgcatgaccggctcttcacgaaggaggagaccgaggaggtcgtctttgagccgaacccggagttcggtgcgtctgccgccccagaagcctgcctgcgtgcttgactgatctctctcacccttgcttggccagtctggtgctggggttgggacggtgcgggcgacctcgacgggcccgacgtcgaccccatctgggagaagatgccagactactcgttcacatccgaggccatcaaggtcaagcacgaccggagctttagtgcgtcgccctctcgtcgcagcctcttagggcaggcttggacgtctcgctgacctccttctcgccctcgctcgcagagttctgatgagagcctagcagtcaagttcccttctccatcgtctcaatcatacagtctcgggtcctttctctctgcttgccttgggctcgcgcaggcactggtccgtgcccgatgctcatgcgcttcgttatttgttcgagccgagccgggccgagtgaatgaaacccgtgaccagtgaagaggttggacatgtgtagatcgacggtcggcaaagctaggggctcgaagatgcgactgaacgagcgctcggctgctgcagatcgccctctcagtcgacgaccttcttgagcttgcctgtctcgacagagtagagccagccggtaatgcggaccgaggccgggatgagcgcgcagccacgtaggaatgcgacgtcgtccttcgcggaggcgaccgggctgggacgtaagtggacggcacaggcctcgcgtcagcgagcgacaggcatgtatgcgcgcgggacggccggcgacgcactcgtcgatcggcaggaagtccatctcgtccgccagctggccgacctctggtccgagccggtctgcgatcacccccctgatcttggcgttgtcaaatttggtcgcgccactatccagaaggggaccggtccgagggtcagcgtgacgagcgagacgttgacgaccagccagcctgcaagccgtaccagtcagtgtgcttgatgacgtaaatctcattggtgcctagcatctgctgcgagacgacgaggctacgaagcgcgtcgcgggcgctgccgccggcgttgcggacaatgtgggcgtcgcctaggggtcgcgtgtatgcgcagtgagcgattcgtcgatcgttaggctcggaaggtcaagggggcgccgatagagacgacgcaccgagagcgatcccgaacgcctcgaatgggttgatgcgggattccatacagacgagtacgacgtactgtaagcaagtgtcgaagtcagccggacaaagtgagagccacgtcactcgggcggacctgcttggagggcgggagggggaggtagcccttttcgtaggcggcggcgtaggctgcgttgcgctcgacgaggcgggtttcgttgggagagtacgacatctgaaagggcttgagggtgagtcagagatgcgtggtggtgagtggcgagagtgaagaaggtaccggccggaccggccaactcgtcaggcgccgcgccctcgctcgcacggaactccgcccctccctcggcctcaccagccctcgcgcacgacagccgcagccaaagagcttgcaagaggacatcgagaagcagagcaagccgaagaggagggctcaggcgagcgtccggtggacggtgtcgaccaggcccgcccggtctgcccgctggtagacggccaggtaggccgtcgcgttcgtccctgtcggcgcgaggacctcctcgggctggaccttggtcaccgtcgagtcgttgtacttgaaccactcgtccgggtgatggggcacgttgcgctggtagagccagtctgcaaaagggaaagagcatcaacagggatcgctctttcaagcgcgcgcaaaggagaaaaacgtacagtgaccaaaaccggtgtcgccacggtgcatgaagacggacgtcaggatgtagcacgcagcctgactgtccctccagaggtcctcgacgagcgccttgagccgaacgatctcggcctcggccgcggtcacctcattgaggacggccgtccgctgcgcggcaaggtcggctcgaagctcgccgtcgatcatgcccggagaaagccagtctgctctggtgaagacgtcgtcgtgaaggaagagcaggctcgactcgatcgacgtgccctggagagacaagaggtcagctgagagaacgaccgccaactggcgcagcgcaagacgacgcacccgaggctgctgcagggcttggatccggtcgcgcaggcccttgatctgccgcgtcaggccagtcgtctgggccgccttgtcgtcgtcggccggacacaggtaccggtcgaggacgagctcctgcggcaggtcgaggaaggcattgctcttgtatgcccgcccggtctgacggtcgaactgggcgcgctgcgataggcgaccaatgaagaagctaaaagatcagccggtattggcttgagcgccttttgagatcgcgagcggacgcacttgcagctggaagtggaagagcgccgggtactggaccgggacttcgcgcatgagggccggctcgcctgcaatctcgaccggctcgggcgtgtagtactcggccaggctatcgtgcaggtccctcgacgtgcccgtgtcgccaacgttgagcagaaggtggttgaagatgacctcctggttgtgcgcgccgtcgggcttgctcgcctcctcgtcaaaggtgatgacctggcgcgccttgccgaaaaagaggctgccaagaagggacaggacgcagagataaagtgtcagacaagccgcatcgaaggactcttcacagtcgagggtggacgcactccttgacgacgctgttcgcgtgctcgttcgtctgctggagcttggccgagtcgagcgcggcgtcaatctggaagaggcagttgtcgaggcactctgacacgtcgtgctgcttgccgaacatcatggcgccgccgaccgagtctgccatgaacggcttcttggccgacgtccggcgcggcgggagcggtggtggaccagcaggccggggcgtctcgagcggcacctgcggcacgtcagcgtctggcaggccgaccccttctggctcatgcaagagcaggccggcttccggctcgatcgtcatctcgcgcgtcgcatgccggatgctctcctggtgctcttgccgcggcgactttgcgctcatcggcgagaggacgggcgatgtcggcggggtcggctcggttgtcacatcagatcgctccgacatggccgagtcggtccgaaaggcttggcggtaggttgtcggcgaggtgacctgctcgccaagcatcggatcgtcccggtcctcgctcgagcgcttgcctaaaaccgaggacgtcgacgacatgaggcgtggccgaggcgctggcggtgacggtgactggatcgcagagccgagagcctcatcgacgagcgtgacgtccgtgtctgtcgatttccgctcggcgtctgctgaggcgggcccggccaccggctcggggtcgttgatctcggccgcctcgtcttgcggcgtgacgagagcgaggtaggcgagctcgcgctcgggctcgatcgaggccgtctggctgtactcgaggctcataaacaggctacctaggagatcaatgactgacggcggtggccagagagagagcgcaactcagtggtgagcactccaagctcgtgacaggcggattcgactcacagcggatcgatcgctcgatctccttccggctgacgacccggccgccgacccgcttcgcagtctttaacggcaacgcctggaggtcctccttgaactggtcggcctgcgcgataacctgccgaaactcactcaatgtgtagaagtactaaggggggagtcattcggcacgcgcgtaggtcagcatcggttcagccagtgcacggtgaccggctcgctgacctggagcagactattgagatagcaagtgttgccgatgttgttgagcccgacgggaatgtcgaccgagacgggcagcggggcctcgactgcgagtgcatcgcctgaaagaaggaaagcgagcggtcagcactgcacgcaacgaccggcccgggctcagcagaggaccgacttcgaatcccggtgtcggcgtagctccgtaggagcttgctctctcggacatcagcgatcgaccggagcgcgtccttgtagcggtccatccggctggggtcgtccatcagctgcggcgagagcgcagacgtctgtcagcagccgttatagagcaaagcatcaatatggacgtacgcggatctcaaacaatctaccgttggcggcgggggagaaggcggaagggtcagcgctcgtcttttgattgttcgaagacgctcgactgacgtctgaagggtgaagtcgtccgtgtcggccgccgcgccgaggacgcggtacgcctcggccgggtccatcggctccctccgcgcctgaaggacagcctcctgaagctgagcgtgcgtgacgggctcgtcccggcgcgacatcgcaatgatctcaaactggtcgatgagccggctctttgcggcgctgaggacctcgctgccggcggcgtgctggctggtgacggcctgaaacgcgtcgcggaagcacttgatgaggtagtcggccgggatgtcgtcctgctcgatcattagatggtcctcggcctcgagtttggtcagacctggcagacgcagaaaaaggcgcgaggacgagtcagctttggagccgtggcagcgagcgacagtcgagcgcacccggaaatgcctcgtaggcgtcatcgagcgccttttgtgtgtgcaggcccttcgactgctcctggacgagcaaaatctggaggtcctcctggccgccgcccgtccactcggccgccgtgtccgagagcgcctggaggtagcgcgcgacgtgccggccatcgaagcgggcctgcatctggtaggcaaaactgacgtacgcggccgggacgttgaagccaaccgggttgaggccgagcgtcgtccgggcgagctcgaaggcggccgacttgtcgccggcgagctgcatgcgcgggactgaagagcgcgatagactgcgtcaggatcaagcgcgtctgtaaaggagtagactcggacgcactgatgcccttcgaagcgccgacggcggacgcaaaggcatggtcacgaggctcgagcttctgcacgaggccagtgtgcttggccaccgcgtctgacgtggggtgcgtggctgcgggaccgaggccgcgtgtcagcatcgacactcagctcaggcgaggtgaccgagctactcacgctcttcgtatcggtactcctcgaggaagatgctgagctcgacccacgcgcgcatcagccgcgcccggacctggagccacgccctctcctccttcggtggcgcgatcaagattgagggctcggcgttcgtctcgtcgtggatcgtaaagccgaggctgacaaagagccgggcgctcagggcgtcccaccgaacgcggctcgcaaagttcttgttggtgaccttgatcgcccgctggtcgttggagaagacggtgttggcaatcatcctggcaggcgcagaaacgtctcgcggtcaggccctcgtctccatgccgctcaagagcagaggagacccacgtgaggataacgacgagggctgcctcgccgccgtgcttgacgccggctggcgggtcgaccgaccgcgtcttcacaaactcccggatgagctccgggctgaggacgccccgaacagccggctcgccagggagaatgagccagcgcatgtcggtcgtcgagatatagagctggtcgggaaccggcggcggaggaggccgagggggagagggaggcggcgtaattggtgtcggaccggtggaggcgacttccatcgattcgacgtcgacgagcatgccctgctcacacacagagggcgcactctctgtcgtcgacagctgatttagcggcggcgggccgagcgctgtccgttcgggaagcgccggcgccggctcgtccggcacgcggatccaccacgagcagcgcacgtcgtccggctcgaggctcgcgcccgtcctgctttggacgagctcggttgcaagccgccggacggctgatgcgcccgaaggtgttgtcagatgctctggcggcgagccgtcgtcgccggcggggacgatccaccacgcccagcgggccgtgtcgaacatgacggcgcccttctcgacaccctcaggccgctgggggagcgacgctcggacctcctcgaccgtcggcggggacgggagattcttgctcgatgatgcgagcgactggctcgaggcggacgtcgggagcagcgagccctccaaaggggctcctgcggtcccggccgcgggcccaggcatcggctgcgttgtctgcgttggcgaggtcggcagaggcgtcggcttcggcggcagattccgaggtgggacgccgacaatcgcgacctcccatgcacggcgctcgcccggccaaagcggcggcgtcaggaaggcggtcggcaggaggccgtgcccgacctgcgggacggccgacggcggctcgtcgagctccatgaagccgccgccgccgaggccggtcgggtcgttctcggccttgttggaccagcccgaaggcgagggggggacttcctggacgatgggcgccacctggctgtcgattgctggaggcggcgacggcggaaggagcacaggcgagctgcagcgggggaacgagagccgtcagcgtcgtctgtcgacctcaacggcagccgggacgaaccggtagcccagtgtagggtccgtatcgtcctggaccgtcgaccgtcttgaatttgctaccctctggaagatcgtgtcgtccgtcatcagctgcgcgtcctggtcggctgccgagctgccgaagccgttgtcgaggagggccgggtcgatcgaggaggcgtcggcgaactgatgggccgtctgcggcggcggcgggacgaggctcgggtcaaagggcatgactgggcctgcaggcttgtggcccatcgcttcgccggtcatgacagaagaaaggagagtgggagggaaagggagggtgcgctgcaagatgggtgttgaaggctcagccacaagggccaacggctggaggcgcgtcggtgacgagcaacggcgctgacagcagcggaggactcgctctgagctctcagttcctggctcttcacgccttccagatggcagaagaggccgccgccagtgatctcttgaagccgagtatgagccagctgagctcttgtgtcggaagcgaggtcggttcggcaggaggcagagtgagtgaagagctcaaggcaggacgcgcaggcggaccagcctgagcctctctccgacgacgttccgacctacggcagatagctgccaaagacggtcgtccaggtcagtctcatgcatgctgcacagtgagcgctcctgcagcagcagctgtgctcctgcctcgtctccctctctcacgaccatctcgcccctcgattgccaaccaagtccctcttgctcggttgttgctgccttctgtcggacgacctggctcgccgaactcgcccggccctcggcctcacgcggtccgaagtagtcagtcgcccttccctcttccttcttctcaacacccatcgtcctcctccctctcctctcaacccctcgctcgcagcaaaagtcatgtccgctccagccgtccgcacgtcggccgagggcgccgtgtaagtcgaacaccttgccagcaccctgctcgacgcgcgcgcgtcctgacaaacggcgtggtgctcggccactcagcctcatctcctacaaggacctcctccagcgtccggccgagctccgcgagagcatagagcgtggtttcggcagcctgaccgactcgctcggcatcgtcgtcattgaaggttccgtccttgtcgctcttccctctgcgacttgatctcaaggagctgacccggcttgcaccccccttctttcgtccgctcagacctcccggccgagtttcctgcgctccgcgagcggctcctccggctcgccaacacatttgcgagtctgccagaggacgtccgtgagaagtatgccgacccgtgagtcactccttctctctcgtgcgagcgtcgtgtgccgctctggtactgactgcgcctcgctcaccccatccctgttggtcgcttacgacggctcagtgaggcccagtactcgttcggctggtcgcacggcaaggaggtcatgaacggtgtacgtccctcttcctctgcctgctcgtgctttgatctgccatcctaacacccgtcccacctcacccgccgtcagaaacccgacctcaacaagggctcgtactacgccaacccgctcgtcgacgtcccccaggtgtcggccgccgagcgcgacgccaatccgatgtactaccgccagaacgtctggccgaaccccaaggacaaggggcttgccgagtttgagcttgcgttcaaggagtgcgtcccctccttgcatgatttcggtcggcgtcgcctgtccgagctgaccacccttctcgcttgcggtccaggctcggcaaattcatctttgacgtcggactgttgctcgccaaggcctgcgagtcgtttggtacgtgtccctgcatcgttgagcgtgacgagaggcttcggctgacagtctgatcggccccccgcttgtctgccacagttgccgagtcgctgctcgacgcctcgcagtcgatcgagaagctcatctcgacctcgcagtgcaacaaggtgcggcaccaggcgccttgacgacaagctgcaggcgcaactctgacctccttccatcgcaggcccgccttctgcactacttcgcgccgacgccagtcccggacgtctccgaggtcgaggagaaggaggtcaccgatgacctttgcggcatccacctcgaccactcgctccttaccggcctctgtctgtccactctctcccgcttctcttatgcgacccccagactgacctcgtcacccgtcgcgcgccgcatccaggctcggctctctacctcttccaccccgaggacggctcgcaagccgaccacccgcccgtgtgcaaggcgccctaccccgacagcgggctctacatcatccctcgtgccggggggaagcaggtcaaggtctcgatcccggcgaactgcctcgcgttccagacgggcgaggccctccagctctgcaccggtttgtcctttccaggagcctccctctcgcctttctcttgtgcggcctaactgaccgccaattctcgccctttcctttcatttctccgacaggccagcgcctgaaggcaacgccgcactacgtccaagccggcaagggcccttcgaccgtcgaagtcgacggcgtcaagggcaccgtcacgcgcgagacgctcgcctttttcctccagcccgacgtcggggccgtcatcgacaaggacggaaagacttttggcgagttttctaaagaggtcatcgtacgtcggctcgttgttcagtcagtcaatcgctagagaaccaacgctgaccttgcctttccctacttgtccaaggccgagcactactaaagcccgaccctcgagagggcacagcgcccgcacataccgacgatctgatgagcttctgcggaacgatctttcgcgcccaatcggtgttgcgctcaaagctgacagcaaacgggagcaggaatgatgggcagggcaaaggcgcattcgatagacggaaggacagaagcagtagaggccggcaagagaggagctagagtgagcgagaaggcaggcgaagaggcgcaaggggagagctcagcgagtcggtgcgaggtctcggtggccgacaacaagagagatgagacgaggtggctcgtgaagcagtcgactaaaacgtgagagggtaaggccggaggaggcaaagaaaatgtgagcgggcaaggaagaggtcagcatcaggtcgagaaggggcgcagacgagagtgaaggaggacgcacggggccgcaagcggccgtcgaggttggtccccgcccgttctgctcgcccctgctcgcctgcagacctcatcctctctctctctcgtgcaaccctactcaagcacccccgctcgacctcggccaatgtcgcccgccaacttccctttcaccagtggcgccagctactacccggtgccgcagcccccgccgcatctctactcgctcgccccggcctcctacgcctcctcctacccacctccgacagtctctgcgccgagcccaacagcctcgagctcgagctcggccgcccggcaccgcatcaacatggcctgcacctactgtcggtcccctttcgccttatcctctcgtttgacgcctttgactgacttatgccttccttccctcttgccaggccgtacgcgcaagattcgctgctcgggcgaggcgccctgccacaactgcgtccggaccaagcgctgctgcgtctttgaggaggtccccgacgaggtcaaccgccgaaccaagcagcgcaaggcccagttcaaggccctcaaagccgccggcttcccgaccaaatcgcgggccgccaaagaggtcgagacgacggtcaccccgacctcgcggcccagcgcacccgctcccgtcgcctggatgcctaggcctgaggctccggtgcgtatggtcgacggctgcacctgccagcgagacttggactgattccctccctctccaacaggcgcccatgctggccttcgccccgccacctcctgccggaaccggcttcgcccacgccttcccctctgtcctgacgccgaccccggcatggacgcccgagctcgacggattctcgtccatcgatcccaactacgagagctcctcgccagcctcgtctagtgagtcggccgcctcgccaacgccctggtcgtcgccccttacgacgccgacgacgctacaactcatcggtcagaacgagccccgcgtttccatctcggccaaccggcattcgcctgcgttcgagttcgacggcatgaccatgtcgccgatgacggagcagtcggccgcctactcgtccttcgcacagggctttcgtccggccgacctcagcaactacgacgcctttccggcctcggtgatgaagcgcccttcggtctcgtacccgggcttgcagcccccgtcagcagacactggcaacccaggcctcggcttctacttgccggccaactacgcgccagagatgcccgccgacgagcgcttcctcctcgcgacggccgacggccggctccctccctctggccgattgctcgccgacgactcgtggacggcgcccttctccacgatccgcctcagcgaccgggcaccggcccagacttggtcgttcgtctgagcagctctctctcatccccttgattttctcttttgctttccccctcgcacccgcaacccatctgtctctcgtaactctacctctgctgcaacccccttctgctcgtaaggcattcgccaccccctcgttctctgtacgcccgctgcactgcactgcaccgcaccgcaacgccctttcctcctttcgctttgccccgctgcattttcacgccccctccgtacgttcatgttgccaccacacccttctgcctgcttgtacgaccagacgaccatgccctcctttcatctcaacccgtgtcctgtgctcatttggcaaaagggcgacgcttccagaacgggcagccgacgattaagacgtttcacgcaagagagcgggaggaggggggggggaagatgggcaaggggtacaagggaggcaagagggcaaccggcagcagggcgagcggctggcccctcgagccgtctaaggggcggcgggggggaggcgacactcttcaacccgacgagttgaccttgtcccgcagcgacgagatgaactggctgtagctcggcgtccggtcgaagcggtcctcgatgaggcccgagagggcccattgccggagcgcgggctcgccgtcttccttgacgatgtagagatgcggccagtaggcgccgcggcgcatctcgcgcgtcttggcgatgatggcattgatgcgctgcgagaacgagttctcgagcagcggcagcgttgtctgtgagaggtgaaggcgggagcgtcagtgacgtcccgagcgcttaaagggcctacgaagggggaccgacctttccgcccggcagctcggcatacgacggcagatcaaagacgtcctgcaccagctggggcactgcatcgcggccaatccagaggaagatgttctgaccatcctcgatgaggaagaggccgtgccgctcgagccgctcgctcgtcaggttcagcggctcgggcaggatcaggccgtgctcgccgacggtgccagcctcgtccgacattgtgtggagcgcgtagaagcgcgggtggaggtacggcacgagcagctgggccggcatcgtcgtcagcagcgcctgggcgtagctccgcatgtcgggcaggatctgcgcgctctcgcgcaggccgacctggaagaagcaagtgaacgtcagcgagagtgtccggccgcaacaagtgggtcgatgcgcacattcttgagcaggccgaggacgagcagcgggaggaagcgcaggttgtgcgggacggcgagggcggtgctcgcgccgctgccgccggcctgggtcgccgtcttgtaggcgccaagcatgtcgacgagctgcttgttgacaaactcgcgggcgtcctccagcttggccgacattgtcttttcgacagccttgcatgcgaggagcgtcgcaatcgccgtctgatcagccgacgcaaagaggttcgagacgttatcggtagtcgggagcgcgagcgtgatgacgcggatccggcgctcgccgtagcacgtcgtgtggaggacggcgcactgcatgtaggccatcggcgtcgcaatgttgtcctcgagctcaacctcgatcgagtacgactggtcgaccgggacggccgggagcgagagcaagtcggtcgaccggatgaaaaagttgccgtggaaggccttcatgcgcaggccgcgcgaagcccggacgcggatgacggcctcgagaccgatctctgaagccagcacttcgccaaactcgtgcgcaaacttgatggcgtcctcggtccgcgaggcgttgaagctcgggtagaagtaggtctggccgccagtgtagcgggggaggcagccttgaggaagagcatctttggggtcagcggccagctctcaacgtttcttggcagaaccgacacgcactgagcgaggcgatatcggtgtaagccgagctaaacaggaacatgtcgacggagacctgggcgcgcgagcagtcgatcgcgaacgtcttgtaaaacgagctcgccggctggaggagcgtcgactctttgctcgtgccgagcagcttgcggtcgtcgcggttcttgagcgcacccggcccgaccgacggcagcgaggccgagagcgtgatgatcttgccgccaatgttgctcacgagcttgaacgccgcctggaggccggcgccgagcgcgctgccagtcgtgtacgtgtcggcaaacatgtcactcaaccggctgagcaggttctcgagcgccggccgggcctcctgcgcgttgacgagcaggtcctgcggcttcggcaggaagacgtcctcgaggtcgctgacgacgagcatcgtcgggtcggtcgacccgggcgggaggcagaagaagtggagcgaggtgtcgaccgcgatgagggcgaccttggtccggccgtcggcgttcggcagccggtcgagcgactcgaggatcgtccgcgcggccgtcgcgaccatgcccgtcttgacggcggcctccgagacgtcaatcaggaaaacgtagcacggcggctggggcggccggacctagagtgaggacggagcaacgttagtgacggccggtcggtgagggacaatgacagaaggccgcaccatgtactcggtcggggcgacaaactcgacgacgctctcgttgagctcggcccgcttccaccggtcggccggctggttcttctcctggtcccagtcaaacatctgcggaacctcgttcgagaggttgcacatcgggcacttccaccggttgccgccctcgataaaggtgacgtaagggttgatgtaggtccggcagcgccggcagcgggcaatgacggtgtctttgacgacagggacctcgttggccgtgccctggcgagccgagggtaacgagcgcaagcagtcagcagttgtcggccaaaggcggaacgtcggagagcccggacgcacgtcaggattcttgcccgtccggtagggcgagatgacgagtgcaaacggcagcttcgacttggcgaggacagcgttcgacgtcggcacggcgttgagcgtcgaccgcatgtatgagtggtcggggatcgcggccgccgactcagtcacgcttgcgttgggcgcgagccggatcgccggcggtgcctcatcgaggttgtgcacgtccggctgaaggccaacgaggttcgtcggcacgagcgggtactgcgagcgaggcgcaagcacgcgcgaacgtcagcgagcggttctacgacgacaccgggatcggccgcgtctggaacgtctgacgcacgcgcaggtcgacaccgccgctcatgcccatctggccgaactggccggcgagctgcgccatctggccaggctgctgagcgcccatctgggcctgaggctggccataagccggctgctgtccggccgcgggcgcatagtagggcgccggcgctccggcatcctggccagtgtagcccggggtgaagagctcgggaccggccccgccagcaccgagcgagggcgagagagtggcgcccgcctcggggttgacgtacgcctgggcctgggcggccgcatactgccggcgctttgggttggacgaggcggcggcgggctgctggccgtctgtctggtcggccgagggcgtgccagccagcgaaggatcgagcgccgggtgctcccactgcgactggccctgtggacctaaaaaggttgggaggaagagaggagggtcgggcggtcagcctcaccatcgcgtgccagccacgaggcggtgcgctcagagcatggccccgacgaactgatgtagtagggcgtcccgtcctggtcgctgcgaaggaaagtaggatagcagagcccgaggagtcagtcagatgctgaagtcgtaagagaacaaggtgaccagcagccccctccgcctcctgccctgcctgccctgtctcatcttttgacgagcgtcacccttccgacaggattccctgcggcggtgttggcgggcttaaagctcctgcaggtgctagagagcgcaagcctgccgtaaaagttcgagctcggtctctacgagccttgaaaggcgctcggggacgccatctcgtcgtgcagcgccgtctttccttggcctcccgccagccgaccaaggagctccagctcgcgctcggccgacaaacgaagctcgccggccacaggggagaaagatggagacgcacgtgagcgcctgccagccggcaggtagcggtgcttggttgtccatcgctctttaagtgggttgttcgaagaggacagggcagaggagggagaggagagaggaggggactctgtgcggcgcgcgatctcgcctcccgcgctggcgcgtccgtgtcacgccgagagtcgttacgcccggccggccgactcgtaactcgcagtctgtctgtcgctgacggccagccctcgtgtgaggatgtgcactggcaggctcatgctagaaagctcagtagcgccggtcacgctcgttgacccggcgggcaggctcgcgctcgtcccagcgcccggcgccgctcctcgacgcgccagacacgtcccgaacccggtcgtcccggccgccgtacgcgcgctcgtcgcggtgctcgcgagaatggtcatccgctgctggatagcgccgggacggagcatcgggcgatggcggtaggtgacgcggtcccgcaaatgatggccctcggccgtcccgaggaggtggcgacctccgccggcggacaggcgagggcgaccgacgacgcggcgccggcgcaccacgaggaggcgagcgttcgcgctcgcgagcgctcgtagaccgccggcggtaccggtcggagtcttcaacgtcgccgcaggccgaaggaggtgatgctgcccgtcggctggtcgagggtcgcgcgtcgcgaccgtcccgctcgtggtggtgtcgccggcgcgaagagtcgccctcgccgtaccgtcggccgtccttatctgcgcgctttgcctccttgcgctgctgctttccttccttctcggcgcgctttgcctccttctcggctcgcttagcctccttcgacttggaccccgagccggatcctgcagactcttcgaggcgagcgcgctgagtgaacgagggcagacgttggtcagcgatctcttcgtcacttagagagccggagctcacatacacgcaccttgttctcgcggatataagccgccattgggtcctcctcgtcgccgggctcgatggccggcacggccgccgccgccggctggccgtcgccgccagtcatctgcgggagagcattcatgcgctcctcgtcggcatcctccatctcgcccgtctcctcgttgagcaccttggtctgccggtagttcttcgtgtggtcgacgcggagcgtccggccgaggaccttcgcgccgttcaggttgtcgactgcgagcacggtcgaccgctggtcgaggtacatcaggaaggcaaagccccggaccttctgcgtctccttgtctcggggcaggttgatgtcgccaatctcgccatacctgaggagcaagagcgtgcggtcagcagcggtcgccggctcgaccggcgtgcgcccggaggacgcactgggagaagatggcgatcacatcgccctcagtcaggttgaagggcaagccgccgacaaagatgtgtgctgaatctggtccaaggggaaggggtctccggtcagccgagtcgctctaagagggatgagagagaggggcagggacgaacccttgtagtcgtcgtgccagctgccttggccgttgccttgcagctcgagctcgttgatcttctggatctccttgacaacgctggcgaatgagtcgggcgagggacacgtcagcgactgggttcatgatacagctgccagcatgacgtcggacctacttcatcgctgcttaactaggcgaaagggaggaagtctgatggcggttgaatccaagagagccggccttgctgcctctgcctgtcttcgcctcgcgcccttcgccctcgacaccgaccgcccctcccgttcgcctcgcctcgccgccgcccgcctctttctttctgtcttatcgcgttgccctcttcctctgctcgccgtccagtagatcttccagcaagtctagtccgtacaacccgatatggcgcttgtcctcggctcgcagcagtcgcaagacaccgacctcgtctcgccgccaaccgactcggtctctgcgctctcgttttcgccgacggccgatatcctggccgtcgccagctgggacaacgcagtgcgtcgctagccgaaggagtctgctgcgtgcgggatgatggccggtcgctgactgaccgagctacaatgcggtctgcccaactaggtccggctgtacgagaccaacgcgcaaggccagagccaacagaaggctgagtaccggcacgagggtccggtcctcgacctgtgctggtcggcggtgcgtcctgctgctcctcgactcgaaacgcttgaatcctccatctagggctaacccgagctcgacgttcctcgcacgccaggacggagctaaggtcttcagctgcggtgccgacaaggcaggccgcatgtacgacttgtcgaccggccagtcgtgtacgtcggcccatcgcagccatgctgtgactcgcatgagagctctctgcatctgccggccgtgctgcatgactgctgacgcgcttccgtgccgcctcgcgtcaaccctccggcgccgtcaacagcccaggtcgcggcccacgacgcgcccatccggtcgtgccgcttcatcccgcaggcaggcggcgccggtattcttgcaacgggcggctgggacaagtgcataaaggtcggtcgggatcggcctggcagcggccgtgctgcctcttgaccgagtggcgatgctgacctctcgacgcacccgtgcccgtcgtgccccgccgccgccagtactgggacctgcgaacgcgtgcgtcctctcgctgtgctccgcctcgccgcctcttcagccgctgacctattagccgctacctttttagccaatccggtgtcgaccgtccagctgccggacaaggtctactcgatggacgtcgtccatccgctgatggtcgtcgcctgcgcgaaccggacgctccagatcttcgaccttaacaatccgggcgttatcttcaaggtccgtccaacggaccgctgccgcttgcctaaagctaatgactttctttgcctcgcgtcttgcagagccaagactcaccactcaagcagcaaacccggaccgtctcctgctttccctcggccaagggcttcgctgtcggctccatcgagggtcgcgttgcaatccagcacatggacaaggatgcctcgtcgtgcgttcaccctccgcacgtcttcgccgagcacgacccctcgctgaccaagattcgaccgccttcacttcaaggaaaaacttctcgttcaagtgccatcggctgccagacgcgcccaaagcgggagagcaggtgtcggtccacagtgcgtgcctcaccttgtttcgatacgcgtctcatgggctgacaccttcgtctgcattcaggcgtcaacgctatggccttccaccggcaattcggcacctttgcgacggccggcgccgacgggcgcatctcgttctgggaccacgagaaccggtcaaagctgaagagtcggtcgccgctctgccttgcctcagggcgacatggattgacatctcgcttgcctttgcagccctggacgccgtcccccctcagggccagccggccaactttcctccgactccaatcaccgccctcgccttcaaccatacacacacgctcctcgcggcggccatgtcgtacgactggagcaagggtcaccagggcaacacgccgcagatgcagacgcgggtccggctgcatgccgtcaagcccgaggaggttcagccaaaggttaagcgctgagtgggcggcgcgggccgctcgtacagcagcggagggggatgtgtctgctctatcttgatgtgtcttgttggaagcaggcgctcagtgtgcatcgagcctagcagtgacgggcgccgttgagcggcacccttgagtccgggtcagcaaagctgcggatccttatcgaagacttctgccggcgagacgtgtcgagctcagaccatagagataaagatggccgcgctcggctgagaacgaggaggagagaggcgggggtgcggaacgagggagctgtggagcgagcaggccaaggccagccaggcgcgagagcaagcggggtatcgatgagcgggcgaccgtatattgcagcagaccagaagaagcagaagggagaaggggcgatgcagagggaggcaagaggaattggtatgccggtggggactgtagatggcggctgctctacgaggcgtactggaggggcgtcatgacctcgcggtagatcatctctgtccaaggtcaatggagagaacgtcagctctcattcgaccgtcgcaggcggttggacgagggcgtacccttgagctgctcgcgcgagagctcggcctggaggtcgtcaaagtcgaaaaagtttgccgggagcgggttcgcgctcggctcgtcgagcgggtcgtgatacggctcgaggtaagggtgcgtgagcgcctcctcgaccgtgatgcgccgcttgggcgagaagctgaggttgcgcggtcaacgtcagtgtgatgctctcgtcgcagtctttggcggtgggacatacgttaagcattgccgcatgaggtcgaccgcgagcgggttggcccgcgggcagacttcctgcaggtctctccgcttgcggaacggcagcgcccggaggtaatcgcggctccgtgccgaggaaatctcgtaaaagtcgtccatcgtcggcgtgccgaggacgtcgaggatgagcgacagctggtgatggtaatcgcggcccgggaagaggggcttgccggtgatcatctcggcgaggatgcagccgaccgaccagatgtcgattgctcgcgtatactccttgaaggctgtcggcggcgggtggaggaaggacgcagcgagcgtcagtcgtcgactcaatcgaagcggcctagaaggagcggcccttggtaaggcacgcactgagcataacctcgggcgcgcggtaccaccgcgtagcgacgtattccgtcataaagccagcgccgccgttgggcccagcatctggcggaggcttggccgctgaccgtgcgaggccaaagtcgcagatctggagagatgtgaagaaccggacgtcaatcggtcactctagcttcgcaaatgttcgcaaatggagcaagcagagtgcgaccccaccttgaggtcgcaattggcgttcaggaggaggttactcggcttgaggtcccggtggaggacgttggccgtatggagcgccttgaggccgcggagcgtctggtagatgaagtactgacagtggtcgtccgagagttcttgcgtccggatgacgcgatgcatatcggtctccatcagctcctgcgaggaccggcggggtccaaaggagtcagcaagggcaaatagggggagggggcggccaaggaggaggcaaacctggatgaggtagacctcgctgaagagctcgtagctgaccggccggacaatgtcgagcagcgcaatgatgttctcgtgccggaagtgccgaaggagcttgatctcgcgcagcgtccggaggcagaacatcgagtgctcgaacggcgtgatgcgcttgatggcgaccttggtggatgagggcaggtgcacggccgagacgctgccacaaggtcgaggtgggtcggccaggtcagctcggcgctcgagaaggcgcaaggaggagcgccagtcaagacgtacaccatgccgtaggcgccctcgccgacggcctcggtgaccgagtaggacggaccgacgtggaacgcttccatcgtcgcgagtgagaaggagagagtgtttcgctagaggccagggtcgagggttgagggtcgaaagcgtgcaggaggacgtctgagcgtcggtcggccgagctgaagggcgagcaggctgcggcgcgcggtcggtcgtcagcttcgactctcgccagcggcagcttgccggatcggaagcgtgcgacagggcgtacgtctgcgagagagagagagaggtcggccctagggctgcggaggaggaagagaagcgacggagggggggggcgggcgggcgaagcgcgcagctgatggtccgaatcgagagaacaaagggacgagggaggacggtgcgcgagcgacgatgcgtgcagcagggccgaagaagcggaggagggcgatgggagggcggaccggcgggggctcgagggctgactctggaggtctgttcgagtagtgcagaggacgaagatggcaaagcaaggaagggaaagaggccggacggtgaagtgcaggaggacaagggcgagaggacagacaagggacaagggccggcgtgtcgaccttcgctcgtcccccgcggccgggtcgctagcggccccggtgagcaaagcgatcgacccccttacatcaaagggaggcagcagggcgaccgccacaagcgagaacaagggagcagagcgggcgagtgacaggccgcggcgtacgaacgaagtcgggcctagtgacgggcgacggcagctgacagcaggcgctccctctgcgccactccgacttccagctgatctccctccaagcagcagtcgtgcttgtcgtgctgacccgtgagagaggactctccggcgtcttgcgagacgtctcgttcacccctccgacctgctcacgaggttcttccccgcccctcggtttccgtgccggccctttgctgatcggcagcacgacgcccgctcggacccgccggcgccatcacacgcaccactcgccattggtcccgtccgactaggtttcggctgccggccagaggctgtggcagggcaacgtcatgctggcctgcccgggctggccgtacggccgaggtagcggcgtgtcggccgacatcgaggacgcagcagctcctccggcgaggccagcccgacgcgctcaatgagcacgcccgagccggcctctccccgataggaaacgagcgagccaagttcccttacgagcagtccaagcgtagtgggacatccttccagcggggggaaagatcgtaccgtgcctttctgaagaaccttctgaagaagggacgacagcgctgcgtgcgaagacgatcaaaagactctgcgcgccaggctgacccgggccctaggcacaagcggcgacggcagaggacaggaggatgcgcaacacctcgacgcttagaaacacccggtgtgcgcgggccacgagcctccccgctcacctgcccgcggcggcagcgagcagaggagacggatctctggctcctgcgtcctggggaaaaggggagagagggagggggggggagggctggtcgctcaagcacccccccgtcctcacctcgcctacagctggacgctcaggaccacacccaactgccagggccatgccaggcctctacactcgcctcagcgcctacgtgcccgcgccctcgtccctgccgctcgtctcgcgcatcacgtctctggccgagcgcttcgcccaagcacgagacttcggcgccgacgagctcgccgtcccttcggcctcaagttccttccatcccgccgacacgggtgcgctcgagctccgggcaatggagcgcgggctcggcccgatctcttttatcagctcgaagttcgcggtcggcctcgtcgtgatggcgattgcgtacgtgcccttgcttcgacttgtcagtcagctagacccaccggctgacaatgacgctcttcccggtcctgtgcagtctgaaccggatgcagagcttagtgcggccgccgcctccctcggccttgatcgagcgcctcgcacgccaaaggcttcgtgaagctcggcgtgcaacccgtgcgcgctcccatcccgccggcggctggcggcggacgctgcgcagtctccgccagcagacggtctcggtcggcaagcaagccttgacgtccccacaggcgctcaccaccctacgccttccggcgattggtctcctcctgtcgacgctcgccaagctgtcgctcgctctgctccagtctgccccaatcgagccgccgcagtcgctcgtcgcgacggccatgtacgaccgagtgctgcgccagccgatggacagcctgctctggtccaccttcctttcagtctgctgctctattgccatcgccgctttcgtctccggtatcaacggatctgcccgaggctccagcttcaaccttttcggcttcgctttcctcctgcacctctactcgagccctctcacgcatgccggcgtgcctgcctgggacgcccgccggctcggcaaggccgccgccgcctcccttgcgacgcggcccgactggaacgtcacgtttggcatctggctggcggtcctcgagctggcctggctgcagctgagcgacctcagtgagaagtggggtcgccggcgcttgatcccaaccggcgtgtgcggcctaatcggcatggtgcgttgggctcgccagctgctcatttctgccatctcggaacttctgctaactgcccaaaacgtctgccgctcagtcgcactttgccggcactctcttcttcaaccccgcgcggctcccgagcttcaccttcctgacgtcgctcgtctcgctcggcatgctcctcgtcatcctcctcacggccgctctcaactttttcacccagctcttcacccttggcgaggtcaactttggcgaactgctgccccactcgagctcgtggccggtcctgaccgacgactggtcgatcgccctgctccgactcgctggcgcctgcctcgagtcatcgacggtcggtggcatgggcaacgaagtcgcctcgctccgagcgcccaagcaagcctttgtagaccttgctgccaggtcggcgacgtcaaacggcggctacgaggtctcgatccaaaaccaggacgagacgacccaggccggcttcggcaacctcatccgcgatctccgtgccgaaggcagcccggccgtcgtgcagaccagctcgggggccagccagccgttcccggcctcaccactcggcgactggtctcaggactcgccctacatccgagagctcaaatcttttggcggcgcgctgtggcgttggcttttggccgccagctggtggaccctcggcctcatacccggggcacgctgggcgtggaacgcaggcgctcagtcggccgagtgggcggctcgcatccgtatgggtcggcgcggcatctggctcgcagacgcaccctcgtcggccgccaatgagacgcttgccgcgccagctgacgtcttcggccaggacgatgtgtcggacgaagaggaaaaccttgacaatttcactcatcgtctagccacggccgacctctacgcgcgcttcctcgcaggagagacgattgacgagcaggccgaggacgacgacccggcgttcgagtacactccgcagcgccggcgctcgcagcgcgagcggtcctactcggcctcctcctcctccggctcatcgacatcctcctcgagcggcgacgacgacgtcgacaacgagaacgacaatctgctcgcgacatacagcgagcttccgccttcccccaccttgccacctgtcctcctggcccacatgacgagcgcgtctcctctcacacgctctcgcttcagcgacctcgtccgccaaaggccggcggaatctttcggcgctgccggcggtaggacagacgacatggagtctgcaatccgccagcgccgtgccgaggcattgtcaagccggcacggtggcggcgaggacgcggccgaggacgacgacgacgaggcctcgctccctccgtgcgccgtctgctgggccggccggcgagagattctcttgatcccttgcctgtgcctggcaatgtgcgccgagtgccgggctcacatggccgtcaagacggcggcaaaggatcacacgtgcccatgctgccggaccaagtgcgtatcctcttccttctcgtgaagcagcagcgccgagctgaccgttttcacgcaacgcttcgcagggtgtctggctactcgcgaatctatattccgtagacgatcgaccggcttctctctggactcgcttagaacgttgtacttttggccccccaaccgcacgagaggcgagagcaaccgagcacgacatctaagacgaggcagccgcccctctagagagaataccctttggcccgaggacgacctcctcggccgaagcaacgcagccctcgagcagcgggatgccctcccatgcgtacgccccgacaaaccacaacccggatgacccctgcagctcgtgcaaccgttttaggtgggccgtcgattcggctgtaggcagcgcgctgagagacggaagggacaaattgagtcaggtgtgagagcaagcaagccggcgaccattgggacgtaccgctcgagctttgcgatcgagagcaccttgctcgggtcgatgggcacgatcgggttggtcgtctgataaaccggcggctggccagcgatcgggcaccgcatgatgtgcgtcgccatcgtgaacgactcgtcccgcgtcggtgggaagtgattgagtgtgccagccttctcagagagcgcagctgcagcggctggcggggcggggcagcggacgaggttgaggtcacggtgatccagctgcgaggcgggcaggacgctcgggtcgcggtgattgacaacgatcgtcgactgcgatagatggcgtctcaggtcagccatggaacggttgacaatacaacaggtcggacgaagactcaccacgtagcggaacgagcccacgcagtcaacgacctcgttgacgctagcgccgccagcggctgcgtcgagctcgaccgtcttgaggatcgcccgcgcctgattggcctgcgtcgcaagaacaacgtcggtaaagccggacatctcaacctgcccggcaggcgtctcagctgtgatagtgtagaggccgtcgatgcggcggatcgagatgatcgtcgtcgacaggtggacgtttgacggcgggaggggggcgacgagcgccgcagcgaccgaggcggatgacgtcgggaccgagtagtggggcgtcaaaatggtgagccagacgtagtctatcgcgggaggggtccgaattgtcagttgccagaacggaagccgcgacggaggcgcgcagcgccggacacgacgcaccgagaaagaggcctatgtcgaccttctcgagctgctggtccgaggccgacgagatggcgccaaagagagtgtagagcatctcgcgcacgaattgctcccaccggatggcgacccagtcgacccaacgcccgcggccagtctcgcccgcccaggcggcgacagatccacctgggctgcccgtctctcggtaggcgtaggcgaggacgagtaggtagaggtagcacagcgcgtactgtacgagtcggaggacgccggtgatcttagtccggagcccgccggcagggagagcgagtgaggcaaggccgctccgtccctggtggaggaagtgcgtccgcggccgctcgccctcggcgcgcaggtgtgagaacgagtaggtgtagtacgtcggttggagcttgatgccgagcttgcggtacatcttgatgagccgcgtgtagtagcctaggcagggccaaataaaaacgctgttcagtacggaaaggcacctgaagcgagtcctgacaaaggcgcaccgccctggagagagcgcataggcacgtcgaccgtccatgatcgcgacgagtcgtgaccattggccgagccgttctcgcctgcaggaatgccctctaacggcacgacgagcgaggacgaatggaagccgagcgttgcagcctgcagccaaacgaaagagatgttcagggattggccgggactagaagcagccttgcctgttggcgtgaggacggaccttctcaaacaggtggacctcgctcggccggccgttgtcagcctcctgctggagcagccaggcggccgtcagaccagcaagaccacttccgacgacggctactttcggcgacggcgaagccatggaggttcgagatgaggggttggagagaagggaaggcgttcgaccagagacgcgacggcgacgtgctgaaggagttcggccaggggcgtcaacgcgctgcgctggcgaccgaggggagacagatcgcgcgacagaagccgctgacttgttcggcaatactcactctggatgctgctgcaagcctggacaagggcgaccggatggacgtcctactggcggtcgtcgggcttccctccgggcgccgggctcgatcgatctgcctcgcaggccggcgcagcagcggtcgccctcctccgagacggccccttggtctgcaggccgcctgggcagggccttctgctcagccaggaagagagggaatagctcgtacatacacagactggtctccggcccctcaccgacaagagcaagagcgcagctggacggtcgctcggcgtcgtctcgatcatccggtcgcgttacggccgtgtaagggcttccgtgacggcctctccgcgcgagctcgctgacgacggcagcccccgccctctcgacctggccatcaccttccctcacaagaccctcacacgccctgagccagtcgctcgagccttctcggacagtcagccggctcctcctcaggtcgagaagctccacccgtcggtgctaggtcaagcgtgcgcgtggacgcggatctcccctcccagaccgcgacgcggctgtcctctcttctgctgctgctccttgtctgcgtctctcgccgcctcgctcctctctcggtctaccgagagccggacgtcttcgcatgccgccgtactctcctccaccgcggcacgcgacgctgccgctcccggcctcgtcgtccgtgaagcagccgtcgtcggctccccgctcacgagccggcactaacgcctccggcagcggtcccgacggcgagcgctcgccgaacgacgactatgcgtggtcgacgacgctccggcgggcgccgagcatttcgctcgacgaccaggcggcggacgacgtccgggccaaggcggccgaggctgtcaagtggctcgggcacaaggtcggcttctcacagagctcggatcggcgcgagagctcgtatgagctgctcaacagcgcggctcgggcgaggccgcaaggccgtgaggagacaccgagcgaactctttgcaaagatggacgtcgcggtaagtctcttgagctgacgagggtctcacttgagcgacggtcgctgaacgccgtccatcgcccgctcgcaggagacgctccgtttccactcgccgacgaccgagaccggcggcctgccgtcctctatcgtcccgcacctgcgcgagacgcatggtctaaacgagtttaccgttgccgcggccgagcacatcatgctcaaatttgccaagcagatctacgagaacccgttaatcctgctcctgctcgggagcgcggtcgtcagcctgctcgtcggcaacaccgaggacgccgtcagcatctgcatcgcagtcatcattgtcttgactggtgcgttccaggctaagcccgtcctcgcggctgagatccgatgctgacagcccaccctctctgcgatctgcagtcggcttcattcaggagcagcggtcggaaaaatcgctcgctgcgctctcaaagctggtgccgcactattgccatttgatacggtgcgcaggtctcaccagttcagagacgcacgctcggcctctgaagctcgtcctttcctctccacgacagtgacggccatcagcagacgatcctcgctaacacgctcgtgcccggcgacctgatcactttcactgtcggtgatcgcgtaccggccgacgtccgtttgatctcggccgttggactcgagattgacgagagcgccttgacgggcgagacccggccggccaagaagagcacggcagcctgcgtgccccagccacacgggcacgacgaaaaggacgccgcagaccatggcctggccctcagcgagcgaaacaatgtcggcttcatgggcacgctcgtccgcaacggccacggctcgggcatcgtcgtcggcacgggcgtcaagaccgagtttggcgtcatcttcagcatgatgcaggacgtcgaggacaagcggacgccgctccagattgcgatggacgagctcgcccgcaacctgtcaatcatctcgtttgccatcatcggcgtcatcatcctcatcggcgtctttcagaagcgatcctggctcgagatgtttaccatcggaggtgagcctgcgccggcgcagaagcgtctccctcgcttatatcaagactgacgcctctcccgcccacctcagtctcgcttgccgtcgccgccattcctgaaggcctgccgatcgtcacgacggtcacccttgcgctcggcgtccttcggatgtctggtcggaaggcgatcgtcaagaagctgccaagtgtcgaggcgctgggttgcgtctcggtcatttgctccgataagacgggcacgctcaccaagaacgagatgacggtgacgacaatctacacggtcgacgaaacgactgagtttcacgatccgctctacgtcggtccgaggtcagccgcgctcgtcaagacgatccaggtcggcaacctctgcaacaacgcgttcaagaatgagtttggcgtcaacgtcggccaggcaactgacgttgccatcctcaacacgatcagcgtctttagtatggaggacgcccggcaggtgcgccgtctttgccgagtcatcgccctgcgagacgagcggctgaccagactcgcctttcgcagacgttcgagcgcacgctcgaggtccctttcaactcggaagcgaagtatatggtggtcgccggcaagcagtcggccgctgccgacgcccaggagctcctctacctgaagggctccatcgaggccgtcctcgaccgctgtcgattctaccacgtctctgacgcttcaacgccgtcgctcgatgcaactgttcggggcgcaatcctaagcaaagcctccgagattgcctcgaagggccttcgggtcgttgcgatggcttacggcttcggctcggccgacgatctcgccagacccgacggcggtgagcttgtctttgccggcttccaggcgatgatggacccgccgagacgcggggtggcggacgctattgctgccctgcaggccgctggcatccacgtcgtcatgataacgggcgacgccgagcagacggccatgtcgatcgcacgccagctcggcatgcgcgtcaacaccggcacctcgagctgcctcacgggcaaggccatcgaccagatgtcagaacgccagctccaggaacggatcacaaccgtctcggtctttgcacgcgtcacgccgaagcacaagatgagcatcatctctgccttccaggccaacggcgacgtcgttgcgatgaccggcgacggaggtcggtccctgcatttctgtcggctgcctctgagagctgaagctgacccggacgcctgcccccctcgcagtcaacgacgcaccggcgctcaagatggccgacattggcatctcgatgggcaaaggcgggacggacgtcgccaaggaggcggccgacgtcatcctcgtcgacgacaactttgcgacgatcctgccggccgtcgaggagggcaagtcgatcttctacaacatccagaactttctcgtcttccagctttcgacggccgttgccgccctgtcgatcatcaccatctcgaccctctttggtttgacgaacccgctcaacgcgatgcagatcctctttatcaacatcctcatggacggtgcgtcggcgtggcctgactcgatcgacgagcgtcgtgctgatcggtttcgtccgctgccctcaggcccgcccgcacaggcgctcggcgtcgacccggtcgaccgcgccatcatgcgccgaccaccgcgcgccaagaacgcgcccattctcacccggcggctattcgcccgcgtcctcttttcagcgtcgattatcgtcgtcggcgtcctttacatgtacttccagcagactatcgaggacggtcggctgtcaaaacgagaccaaacgatggtcggtcccatttcggtgctgacgttctctcactgctgagcgtcagctgatgcccctcacttcaccaacagaccttcacgacctttgtcttcctcgacctcgcatcggcggtccaaaaccgcggcctcggctgctccttcctcgccaaccggatgctctttctcacctgcggcgtttcgttcgtcgcccagctcgccctcatttacgtcccgttcatgcagggggtattccagacgcaggcactgggctcgcgcgacttctttacggtcctcggctgggggctcgcgagcctaacgatgcacgagggtcggcgaatgtacgagcgcaagctcaacgccgagcaggagcgcgaggagatgggccgctacgaggagggccggccgtagcacggcacctattcatcgccttatagacggacgcagcttaaattggaagaaagacgacggaggaacaaagcaaatcaaggcattgtgcagagcaagccggcgagaggagcggagagcaggaggtataaggaaacgtgggcgagcggaagcggttcagctgcggagggacgagaaggacgagtgtcagtatgggcgggacgacaggcgacggtcaagacgggggcaacgcactatgtccgcttgaacggagggacggccttgcactcggcctcgtcgagcgtcgtgccaatgaccttgcggtaggagaggtcaaccttgcccgactcggtgtcctggaacgaaagcgtgtgcttcatccaggcgtcgtcgtcgcggtcggggaagtcctcgcgggcgtgggcgccacgcgactccttgcgggcggcggccgaggtgacggtctggacggcgttctgcatgatgttgcggagctcgagcgtctcgacgaggtccgagttccagatcatcgaccggtcagtgatgccgacgtcattgtacttctggtagatctcgttcatccgcttgacgccgttgtcgagcgaggcctgcgtccggaagacggcggcgtcggtctgcatcgtcttctgcatctcgagccggatcgaggccgtcgagagcttgcccgatgagtttcggatcttgtcgagctcggcgatcgattccttgccgaggtcggcgtcgagctccttgtggggcatgcccggcttgaggttctcggcaatgtggtgggcgcacgcccggccaaagacgacgatgtccagcagcgagttggcaccgagccggttggcgccgtggaccgacacgcaggcggcctcgccggcggcgtagagaccagggacaatcttatcgttcccctcggcgtcggtcgtgaggacctcaccagtgtacttggtcgggatgccgcccatgttgtagtgaacggtcgggaggacggggatcggctccttggtgacgtcgacaccggcaaagatggcggccgtctccgaaattccgggcaggcgctcgtgcaggagcgccggcggcaggtgcgagagctggaggtagatgtggtcgttctccgggccgacaccgcgaccctcgcgaatctcgatcgtcatcgaccgcgagacgacgtcacgcgaggcgaggtccttcgccgacggagcgtagcgctccatgaagcgctcaccctccgagttgaggaggtagccgccctctccgcgcgagcctttgggaagctaggtcagacacgagcttctagagcgagcgaggcagtgcaaacaagacgcaccctcagtgataaggcagccggcgccgtaaatgccggtcgggtggaactggacaaactcgaggtcctgaagcggcaggccggcacgggcgaccatggcgtttccgtcaccggagcaggtgtgggccgaggtgcaggaaaagtaagcccgaccgtagccgccggtggcgaggaccgtcttgtgcgagcggaagcgatggagggtgccgtcctccatgttgagggcgaggacaccgacgcactcgccgtcgggcgacatgagaaggtcgagcgcaaagtactcgatgaagaagttggtgttgtgcttgagcgactgaccgtagagcgtgtgcagcatcgcgtggccggtccgatcagcggcggcggcacaccggtaggctgcgagcggtgtgacaggcaatcagcgcgactttcgacggtgcaaggcagaggcgcaagggcactcaccctggccacccttgccgtagtcgagcgactggccaccgaaagcacgctggtagatcttgccctcctcggtacgcgagaagggaaggccgaagtgctcgagctggccgggaaggcaaagggcgcaaatgatcaggctctagaccgcaagaaaggcgaaggctcagatcgacccacctcaagaaccgacttgggagcctcgcggcacatgtagtgaatggcgtcctggtctccaagccagtcggatcccttgacggtgtcgctgtgagcgaggagcgaggaggtcaacacctgacgactcgcggatgcagcaggcagaaaacgccacgtactacatgtgccagcgccagtcgtcctcggtcatattgccgagagcggcgttgatgccaccctggagaagcacacgctacgtcagctatcgaagggacgggcggcgcgaggaagaggcgaggtggacgaacctgggcggcgacggtgtgcgaccgcgtcgggaaaagcttggtgatgcaggcagtgttaaggccggcctcggcaagaccgaacgcagctgtgaatggcaaagcaggggcatgtcaggaaggtagcacgagaagaatgcggagaggaaagtggcgacggacctcgaaggccagctcctccggcaccgctgcacgatcgatcgatcgagatttccgcccgcgtcgaggacgatggccagcagttcgaggcgtcagctcgctgctcgactcgatatgagcacaggtgatcagcaagagcaggtggagagtaggctcacacaacgacggcgtcgaactcctgcgggagccgtagggaaaaggcgcaggaggaggtcagccggtcgatcccggagaaggcatgtgagagggccggcgacgcgagcaagacgtacgtggtcgatgatcgggtagcgctcgccaatgttgcgccacttgccctggaaaggagcggacagaagggcaaagctcgtcagtcaagaagctctcgccaccggcctagcttccatcggacggtatcggggggagaagagagaggtgggctgaagagccgagcggcatccagcgcgagagggacgcaccgtgtcggatgcggtagcacggagcgggttaggcgtgacgatgattgaccgcttggcgaggccggcggcccggcggggcgtctcgagacggcgggcgatggagcgaagcatcgagaggggtggtagagcgggtggtggtcgggcgggcgaggacgaaggtgcagagcgaggcgctttcgcgcccgccgcaacaggccgcgacctcattggtcgcccgcccgccacgacatctcttgaccgccccctttgaccacgacttttcagcagacaggcaggctttcctgtgcatgagacatgcattgtgctgatctctgagccattccgcattgttgaagagaaaggacggccaaggaactgacgctcgtcgcgcgcgcgaggcctgcgcctcttcgggggtcgtcggcccggcgcagagtgctcgcgcccgtcggccgactgctggcccagcagacgtcgatgcttcacggctccaaggccagcaggtcgaagcaggccagaggcatcacagatgactccttgactgcaggacggacgagcgctggctcgtctcgcgccgcgcgaagaaacgaagggaggtcaagaggggaggggggtcatcgccggcgctgcaaaaccagtttgcgcgctcgagtgagacgtatagaaaggggagcttgacggggacgaagtgttcgtgaggggggctttggggggcgaagagagtatctccaagagctaagggaggagcgagaaagggcgtaggcctagccggtgatggtcgaggtgagtattcgacgtgcacgatgcctatgccccctgctgctcatcctgacgtcgaacgcgcacgcgacagtgcattgagggagacgatcaggatgccagcgtactcgtgctcgctctccctcggagcccgaatctgagcggcctctgcggcagtagcggaagagaatgaatggcaggggactgtgacaccgagttggaggatcagcacaggatcgcagccttgtcagagcagactagaatgcacgccaaaattgtcgatctgcgcgcaccaggccgcacttgcaccttacaactgccttcatctgcactcccttgcctcagccgacgctgaccagtgacgacggtcatgagtatccactgacgagcgcacgtgctccagcgaccacagtatccaccgagagctcatgcacggcgacctcagccgcgaccccctccgccgagcgccagtccgcgacgacgacggtgtgtacgtcgccctcgcgaccaaagcggccctcccagaaggcgatggtgcgcgccctggcctctgttaggtcggccgctgacgaggtgagcgtgatccgagatccggggttgaccgccagagagcgaaagtcaacggccgcgcccaggtcgaacgctaaggagcggaactcgatggccgcccccaagccaaggagcttcgcgacggcctctttgtaggtccaaagcctgatgatgtgttccgtccgggcggcgtcgtctggcagagcattttgcacttggtgctcgcaaggggtgagctgcatcagaggggcgcggggtcagcctgccgagcgctctttagcttgcacggcaagacgtaccaggtcgcccagtgagccgatgagcgtctcgtagtctgggaaggcgtccggcaggccgagccacatgacgtcgacgccgagcgcgcccgtacctggctgacgatccttcggctgtgcgcaccaggcgccgacgacgagccggccgtcgtgcgagacgttccagtcaaggccaagaggcgaagcctgatgtgcagggatgcaaggatagtacgtcaatgaaggcgccgtgaacggcagttgagaagggagcgcacaaagtaaggccggccgtgcgacgtcgaggcgatgtagacgggtcttgcgggagcaatctgctcctcgctgagggcgtacagcgggatcaggcgcccgataagacagcctacaagggagagtgacgctgtaggttagtgagcgatcctcagcacgacccgaggggctcgacgaggacgtacggagagcatccggccggctgcggaagcgccggatgcgctcgaccgagtcgggctgaagcaaaccgagcgccacctcgaagtcctatgcaggacgcaggaagcgcgtcagccgcagcgctctttgaggcagggtggaagagacgaacttcgaccgtcggatcccaggtcgatacgtcgacgatggcgagacgcaccggcggcggcgacggcggcgaggcaggcatcatgccagccagcgccagagcttcagcgcctcaggatgaccagctcgggcaagaggaggtgcacgccgctcaggttcgggtccgggtgcgcgtgcagatccctccggggtgagagaaggttggaaggaagacacctgcctctttggacgaggctgccagttttcggctgctttcggagcaggtgcctgcctgctgcgcgactgcccagcctcctcccgggcgcctgctccacctcgcccgcctgtttcgctcgtccgacctccctctcgacttcctctcttccctcccaaccatctcgtctgccttctgcgcagctcgcacatcctcgcaacatcgctcaaaggcgctatcgctcatgccctcgtcgtcagaccacgccgccttcgcgtacgcctcgccggccttcgccccgcttcgactgccaaaggccaagccggccccgagccagctgacggtccgacctctgctctcgccgggcatggtcctcggcagcttcgagctgcgctcgaccgacgccccgctcggcgccatcacgcccccgccgacgactgagtcgaaccttgccctccgctaccggccgacaccgctgcccagcccgaagcggggcgcaagcgatgacaaaaggacggagccagaggaaggggcggacgacgtcgaggacaacgacgaaccttcaccgcctcctgagccccggccggcgcaccctcatccggatcccgacccaagacctgcaacgccggcgacgccgcttggcaaggacgcaggcggcctcgactgcgcgtcactggccgatgaggtcgacgataacggcgtgcctgcgctcatcgcgacccggcactcgtccatgtcgacgacggcttcgacgtccttctcctcggtcagccggcctcccaaggccgacttcatcgacgacgtctcaagcctgctccaggcgacggccatcggcgacgccccggccgtctttaccgacgacgacgagccgctcgttgccgccgccggttacgacgacgaggccgaggatcccgaccggccgtggatctacggccggaatgaggccgagcgccgctacagcaatgagatgcgccggcacacacttggcgcgatggagaagctgatccgggccggacgagatggcggagcggcgccgcagatgcgcaagaagcgcgggagcatccgcggccggcccgactcgtctgtcatcttcgagacctgagcagtgtgagtctgcgctgtgccactgcttggatgctgaagacagcacgctgagttattgcttgccgttctatcgtgccttcgcaggatgatcgccgacctggcgatgcgaccggcctagctcaagacgctggcacctttcaacttcctttcacgatctcatccatcgtgccgctggacctgtcattcatatgcctcctggtgctcctcgcctttgaatcctcacggccgctctcggcgcggcatcgcaccccgccccttcggcccatcgccccttcttgtatcgatcgcctcacgacctcgccaccttccgccatacttgtcgcccctcctcgcttgcttatgctccatctgagcgctcttatcacactgctctactgccatgccctactttctgcttgcctctcgtgcgttcgttagggagggtcgattgctgctgcgcctggctctgcctgactctgccttgcccgtcgtccagcttctggacgcctcgccgttcaagtagtgcagatggtcccgcagtgctctggctttcgtctcataacctcgtcaatctctttaggccgtctcgggatgcgtactggcgacgctccgggcggcgacaggcgaccgcctgcgcgtctggccgcctcgaggcgctcggcccctcaaccttacccttccttcaatccggctcccgtctccaacaccaccgttcttcgacctagatgcaggtcggacgcagtccgtagtggggagctcttccgcttgctgacgtcttgactgccgcctcctcgctcgtctcgtaggacgcccgccgacaagagatcgagcgcaagaggcagcagctgctcaacctccggcgcgagcgtgagcagcgccgggcgttgctcgaggcggagcggtcggccagctcaacccctgcggtacgtcctccatctgagatcctggacagcactagagcggcgacgcctacaggctgcctgctacgacggatgaaggccgagctcggtcggtagctcgtgctgacctgctctgtccctctccgcgcccctttgtcccagcccattgccgtcagctcgccggctcgcccgtctcggcgcgaggtcgactcgctcgttgactctctcatcgggccagcaccgcctttgagcgccgggctcgcaccaggcttctcttcaggctcgaccggtgccgccggcgtcttctctggcgcgtcgtcggcggctgggccgtcgaccccgtctcgcgcgacggctggcttccttcgcgatccagcagacagcccgagccgcctcgacccgagggtagagagcggcagggagagccaggcgagctttatcagtatcggtgcagatgcagagaggttcgtcgagaacctcatcccgtgacggcttcgaagtctcgctgacgcaggcatcgcatgcgtcccgtccgcagctcgcagccgacaccgacggcgccgccgcctctacttgaaactcagcagcgagtaccggagaagcctgcaaaggttcgcatcacttcgagggctcattccagaggtgcatacctcgctgatccagctcgcacctctttcgcgccagatcctctacacgaaagcggtacaaacctcgttctattcgtcggacgacgacgcaggcggctttcctgctcacatgtcgaacggcgtcggctcatcgaccagtacggatccgccacgagagagcgaagacgccatgcgcaagcgcatcatcaaggagctcgaagaggagaaggcagcgctcgacaagcagatcgaggaggagcgcgcgacgctggcaaaggaggtcgagcaggaccgcttgcgaggtcggtcgggctcctctattcgtgaggactgaagcggacctctcaactgaccgactcaccgcaatccggcacagaacttaccgaggaacagaagagcgagatctactcggctcctgccttcctcgaatttgtcgagagctcgtccaagattgtccaacgtgcgctcagcgacggctacgactactgcaaagattatgcgaccggcggcccgggcgacatgtgcgtgtgccttgcgcgagcgtccgtcttatccgaagagccgctgacccggtctcggtcatgcagagatgacgacgagggtcggactgtcaagctcgtctgcacatttgaggacgaccgatggacgaagaagcgctcggtcaccggtctcgactggtctccaaaagtgcggcgttgtggctcggccgtcttggcgaggcttcggagcagctgacctgcgcttgctttctgcctccccacccagttcccggagctctgcgctgcgtcgtacaacaaggatccgaccgcggcttcggacccggacggtctcgtctgcgtctggaacatgcacctgctcgatcggcccgaatacgtctttcactcgcaggtcagcacgctgccgcttcgtgtccgcgtctgtggcacttaattgacgtccgccgccttccccgacattcgacccagaccgacgtcctctcagtcacgttctcgcccttccactcgaatctcatctttggcgcctcgcactcgggtcagatcttgctctgggacacgcgggcaaagcacctgccggtccttaagacacccctctcggccgcgggccacacgtaccccgtctacggcatgaagatggtcgggacgcataatgctcacaacctcatcacgagcagcaccgacggcatggtctgcagctggctggcagacatgctcgcccagccgcatgtccgtccgcactctactcctccctgccgactgagcccgccgctgaccccgtctcacgctcttcgcaggagacgctcgacctgcgacacccggctcaccccaaaacggacgaggttgcaatcaccgcgctcgactttccagacaacgagacgacgacgttctgggttggcaccgaggagggcaacgtctaccaggcgaaccgctacgatcgagccggcgccaaggccgggcttaatcagcacgatctctatcgcggtcacgctggaccaatcaccggcctccactttcacccactcgtcggcccagttgacttctcagaccttttcctgacgagctcggtcgactggacgatcaagctctggcggtccaaggccggcgttggctcggccgcgtccaaagcggcgagcctcgtcgcccagggccagccggcaacggccgtcccgccggtctgctcgttcgaagaaagcaccgattacgtctacgacgttcgctggcatccggtccacccggccgtctttggcagcgttgatggcactggtcggtttgacctctggaacctcaacgtcgacacagaggtgcgcctgcccgttcttgccgcgctgaacgcatcagggcgaatcagatccgctgaagcctgctatccgctccgctctctttgtcttccttccgtcgcggcgacgagcaggtgccgatccacgcgacgcagactccctctggccgggccctcaacaagctcgcctgggaccgcacggacggccggcgggccgcggtcggctcggccggcgggtccgtctttgtctacgacgtcggcgaggctgccgtcccggccgagggggagtggcacgctctgcagcggacgctcgccgcccttgcagctgccgagcgcgaggcagacggcctgctcagcttgcacgacgacgacggcggtggcgcgggcggcagccgataaagtacgatgttgatggaatcatcacaatcgcaaagagccatcatggcaaggcgaacgactcgatgaagcgcaggtcgtcagcgggtccagccggccgtaggcgtgacacacgccctcacgcccttacgcagtaatggggcgtgtgatatgcctagtcggccgctgatcgctgctttctcggctacgagcaagatcttccctgcgaccatccttgaaaagctcaggttcatgctgaatcatcacgcgtgcggctgataggcgtaaggcggctgctgctggggcgggtgaccggccgccgctaccgacgggccgttgacaggcgagggcgagggcgaagcgccgtacgacggctgaggcgacgtcacatagggcgtttgctgaggctggtgcgaggggtgaagcgagccctgcgaggcgtgccgctgctgctgctgagccgggtgctgaggctggtgctgagacgaatgctgctgctgaacgccctcgtacgagttctgctgctggagctgaggcgcggcggacggcgggccgtgctcgagcgccggttgctgctgctggcccggaatcagcccggcctggccgtgggcggccgccgcctgctgggcgtagtaggcctgccactcgggcgacatgtgctgctgctgcggctgttgctggtgcgccacatgcgcagggtgctgcgcgtgttgctgttcgccagcgacgggagccggaccctgagaggggccaccggcgtaggcggcctgctgctgctcagccgcgaacggcggcgattgctgctgctgctgttggccgtgtggggcctgctgaggctgctgctggggctgctgggcatactgatgcggatgggcgtacactggcggagcggagggcgaagattcggcacagtgcgcgcaagtcagcaaggtcacgactcgggagccagagacagacggaaagggtcgcactctgcggcgcaggcggggcgacgtgcgggttcttcatcgcctggtagctgaaggccgcctgtgcaaagatgttcgagagggtctcgagctcggccttggcgccggcatacttgctgatgaggccgccgagcttcacctggaggccgacgcagccggcatagagctcctcgacgtcgtcagggatcggtcgcccaggctcgacggccctcagccgctcgagcagctcgtcgaagcctgcgatccgctcaaatagctcgtcctcctcctcgcgctctagccggagctccgctgccgacggcgccggaaggggctcaacgtagttgacggggaaaataccaacccggccggcgagcgtgccccgccaccactggtcgtacgtccggccgatgaccttaatcgactggccggcctcaaaggcgagctcggtcgggttcgagggcgcgtaagtgtagagcgcacgaacgcggaccgcctgctgaagcggcggcgtcgaaggccggtcatcgaccggagcggcggcggcagacgatgtcgaggctgccgtcgtctgcatctgctgaggaagcgacgacgaccggtggtttgtggtagagctaccgctcgctcctcggccggcctgcgcagcggacgatgacgatccgccagcattgttactagcggcgccgctcgagctagaacctccgcccgacggccgagaggaggccgcgcccgaagcgtgccggccgcccgtctcctgcttcgagagctcgagcacgcgtgcaagttcagcctcctcggcctcctcccgcgcacgctcgacagcctcgggcgccgggtccgagcgagtcgaacccgtcaacgcttgagagtagtcggcatcttcgagcgggaaggaagcagcggcaacatgagtcaacaactgcaggagtcaagcgagcaggccggctcgacggcgggagcgagagggacccactcttcgccagacggtcatatagctcatgaacgagcgccccgtcgtcctcttcgcttccctcaaattcctcgttccacttgcgcacgagcccgaggaccttggtccggactggtgcggccgtcgtccggtcggtgacgacgcgctcaagcccgtcggtgaagctctttgacgagatctcgcgccggacgggccggccgcagttctccgagagcgagttggtgagctgagagcaagagtggaaggttgagaagtcagccatgccgttccagcgagctcaggacgtccgtttctaggtaaaatggtagcgaggggatccaaatcgggctcacctcgagcgcgaacgtctgaacgttggggttccgatgggcgagccgcttgaggatggccgagatggcgttgcgagcgctgatggtcgattcgagcgggcggcgagtgaaccatcgggtgcgcaggtgtcgaggtcacacgtcgaccgattgaaggacggcaagtagagtgggagagcgcggagagtatcgaatggtcgagagagatggaagtgcaagggaagggtatcagggtcgctctggcttggctggtgggaggcgtcgggccgctccgaagtctccgtcctgccccctgcactactcagcttgagcgagatcttcgctagccccgtccaggaagagaccggtcaccaggcagaggtccaaccagggaggagctgatcgtccgctcctagctccgccagtcggcccctcctcagctcgcgcgcttcgacgccaaacgacacccctcctgcctgagcaatgctgagcgtgaagacgaagaaaggaacgcacccattctcgccctcgtccgagaccttgtcgcagacctcaaggaagcgctcccagttgacgtcggtcagcgtctcggccgtgccggccactgccgtccatcgcagagggtccaagtggagagaagggtgtcagcccgaggccaattgaccgtggagcgagcaaggcagatgaaggacgtaccgacgagctcgtcgtagggattcggtgtgcgaaacatggcgtgctgatggtcaagggaatgtcgtttgacggtggcaatcgcaagaggcgacgacggccatcttgcccgctctcgttccgccgcgccggcctcgactgcggccaacgcccagagggactgcgcgcgtctgcaggcggtgcagcgcaggtcacccgagcgaccttcaagtcctgcttctcgtggctctccagagggcggcagaagctcacatagatgtctctttctctaagctacgagcgccaacacctcaccgatcggaagagtggaaagtaggaggagcaacaaggtatgtcatgcacgcggtcaggtccgatgcatgccccgcagggcggccgccgccagcgcgcaagagccttcccgcccggccgggccgtctctctccatcagccaacctcgacgacactccagctcaagcgacctctgaaacgaaccatcatgcctcgcacacccgccgttcgtctgtgctctgtgctgtcgtcgactctgtattgcgattgcgctgaccgggtctcccgtctcttgtgcgtcacagaagaaggtcgccacccggccggccctgcctctctcgcagtgcgtcccgtggtcccgcctcttccatccttccgccctcctcgtcctctcgcctgctgcgtcagaaggccgtccagctaacacgtcgtgctctgtcgtccttccgtgccaggcttaaccctcatctctcgtccagtgcgtcccttcatcttgtctccttttgtcgagatcgcccgcttggtctgcgacgcgcccacggcgcgcgcgcgccgtggcgggcaggcaggaagaagagacccgggtcggtcggagagacgcgtcctgcgccttcgaacatctgaaccttccctgctctgtgcctggtggcgggctctggagactccgttgcaagagcggagctgtgcctgttgtattgcgctcttttctcgcctgccccagcctgctgactggcgatcttactcctcccgccgcctcgcagtccccaaggagaactacgtcgtcaagtatcagacgatcgtccgcgaggatcaagagattgtcgtcggtcgcgtcaaggtcccgacgcccaagggccacgcctttgtccttcggcgatacgacacgggcgccttttcgcagacgaccctgttcaaggcttgcttcccctcggcctcggacgagcaggagcgccaggagtgcgagtgggtcaaggcctcgggcgacaatgcaaacgccaacggcggtaaggcgtcggaggctgtccgactcgccggaacctgggtcgtgcctgaggttgctctccgcgcggccgcctcgtacggcgtgaccgacctgatccaggtgcgactgctcacgcgattgatcacgcttaaggaggacggctagggactgattaccaatgtttttatgcgttgctccactccaggcccttgcagacgctcaccccgacccggagcaggcctaccgtaagtcgcagcgctcgcaggcggcatccgagactctccaggcttcgcagacctcggtcgccatcggtcagcccgagacgacgtcggccaagtcaggcccgtcgcctgcgcccaagcggacgcgcgtcgctgctacctcgccccctcctccgccgtactccgctccggcggcgcccggcctggccgaggtcgtcgacgctcttcctgagggcactcaggtctccgtcgaggtcgacgtcccgaagcagaccgtcgacgctgccgcgcttgcgacagctgcgcgtgagcgtgccgagcgcgagctcgctgagagccaggcgcttgtcgccgagctcaagaaggccgaggagctccgtaagcaggctctgctcgaggctgctcaggccgcgctcgacaaggagggtgtcgtcgtcgaggagcaggagcagcagtcgtcggtcgcggccaagcgctcgatcgacgcggtcgaggccgacgacgacgccgaggaggcgaccgagctcgaggagggccggcagatcgcgaccaacgctcgggcgcttcgccctccgccggcgagcgccggcagcagcacgctcgagacggtccgccaggccgcttggggcgcgctcgtctttggcgtcggcgttggagcgacgtgtgtactctctattccccgactggacgctccggcggacctacttgctgacgtcttgcctccgctcttctgaccgcaggacgatcctgccccggttctttttctgagtcacattgaagcagcctttcgcgcaagatagccgctgcaccctgccggcctctcctcggccgacctcaaaccaacaagtctcgacctcctcatcctcccatctggagactcttctttcgaagaactccgtatgctcgacctcaccatcccctctcgacgaatgtggtgggagagctcatggcccctcctgccctccttgaaggaaagcagggcaaggggtcgcttctcgccctcgtctctctctccgctataacccccttccggccactaaggcctctctcttcccgacatacctaaacgccgctcgtccgaacaggggtcgctcgcgacactaaccgtccgacgtcggcccctcgccgctctctcgagcttggcaggcgagtctgctccgtagcgacggcgccctccgtccgccttacgcggccgtacgcgtcaaagacgagaggaaggaggaacggaaaggcctgcttacccatggcctgctccctccccccggcctctcaacaagggagaagagagggggcctgctcggcccctccctcgcgcccggccctcctgtattctccacttccgcgtcggttcccttttttctgctcttgcccacaaagggcgagcgctcctagtcatcctgcctcgtcggtttcttttggattatgcgtctcgtctggaacgacctggcgaccatcaacagtccggagtcggcagcagcaggcggccagatcgggcccgcgcagcagccacctacgtctgtggccttcgcgcccgacggccagcatcttcgaccggtccagacgccctgctcgactacctccgtcctgcacgagcagaagttacgcctcaacatcccctgtctgctgagcacgacgactcatcgctgatggccggtcctcgcagattgacggcggtcgctcggcagcctcccttttcattctgaagcacccctttcatccgccggcagggctgggcgggcgcagtagcagcgtggtcggtcgaccaaagcgacgggcgcatgtgggcggcttcggatgcggccggagaagcggcggggcaaaggcggcgtgcaaagaaaggaggaacttactgtcgagaaggtctgcgagcagcacttccttcgctccgcgccttctccttttagacttactggcgtcggcgagggctccgttggaagggtgctgggaggaggaggcgagagagggtggcacgcgggcccgccggaaagtcagccacgtctggcaggaaaaaaaaaaggcttgagcaccttggggcaccgaccgtagacgtcgagctcgcatcgcggttcgctcgctcgctcctcccgcccgaccagctctcaccgtcgctcgactgcctgcctgtcgttgctaaccggctctaggcctctggcagcgctagctgatgaccgaggacgaggtacgcgagctgctagatccggggccacgccggtcctttgtctggtccggcccgcacgcaggcccctttgatcgcagccgtctctccccttgtcctcgcctccctttgttggccgccctttgatcttcctggcctggcaacgctcgctcgtctctcggtcgggcgaatagagccgtctcttccctcggcggcccttcttcctcgtccgcgcccacaaccacctcctccttcgtcgtcgaccgactcgaccccttgctctctcctccgcctcctcgtctcttctacccgtctgctggccagacaccttcccgcgccctctatgctcccgagcttccttcgtaacatcctacccggcggcgccgacgacaacgccgaccaggacccgtcggcaccgaggcgtctgctcctcaggccaacgccgtccgaggaccagctcccgccgccaccggccgaacccctcccgccgtacctcacctcgcggccactcctcttcctcaccctcctctctccgccaatccttgccttgctcctcgccctcttcacgctcaccctcctcgcgacccaggcaacgggcttagtcgccgctgccaagcgcgagatcctcgccggctgcacggccgccgagcgggcgtcgcgcgtgctcgaccatgtgccggccctgatgcgcgagcagagcgagaaggcaatcaagaaggcggtcgagggcggcgtctcgggcgtcggcatcgtccttatgctggcgtgcgtctggcctttgcctctcttctcatcttgccgccgcacgctgaccctgcctccgtttcatcctctgcccaacagcatcaccatcatccaggaggtcctcaagtttctcatcgacaccttccggtcgacctacatgtgctgccttgagctcgtcatctttggcgccctcgcgatcctcatcggcgccatcgaagaggtgtgtcggccatcccgagccaccctgcctttgctcgcgccgtgcctgacctcttcgttcttcgcttcggtagatctcggacgcagtctctgcgacgctcggcgggatccgaagcctcatccaatccgaggtgacaaccgccaactcggtcgtccagacggctgtcggcggcatcaacaaggtcacctcggtctttgtgcgtcgccctcacccttggccagaccgattgcgatctgtcgatgctgaccagcggttgcgccaatccttctcgcagggcatctcggccctcacgatcgacgagtttgacgtccctgcccttagccagctgcaagacgtgacgatcggctcgcgcctggaggctgagctccggaggctcaacagctcgctgccgacgctcgacgacgtgcgcgagaagctcgacagcttcatcgatgagccgttgaatctgatccaggcgaagatcaacgccacaacctcaaactttacctttgagccctcgtcggcggacagctcgaatgcctcggccaactcgctcgccgccgcttccagaacgggccccagcctttgcgccgacctggacctgagcttcgtcgacgacctcggccgcgacctgcaaaagatcaagtcgtggggtatcggcctacttgtcgtcgccatgtgtgtcgcaccctgctctctcctggccccgcccaccaaggctgaccctcaccctgcctccgccagcctcgtcacgatcggtattctcctctacctcgaaacgcgccgctaccgcgcccttcttgagcggatccgcctctgccgcgcctcgcaggccgaccggggcagctccgacgagcgcaatatgctcgaaatcgtccagctcagccaggtgggctttgctggcgtctgggtctggcgcggcttggaccgctggaagcggctcggcgacgggagcacgcgcaggggcaagtggctcggtgcgtggccctgctttgccttaccgatctaagccaatgctaagacctactctcactctgccctgcagcgtccctcatcttccatccactggccctggcgcctctcctgctcggcgcaatcggcctcatcacgatctggttccagctcgcggctgtcagcgcgctcgagcacaaggcgatggccctcgcgtcctcgtcgatcgacgacctgtccacttcgatgacggtctccctcaacgcccggctcgcgatgaccggccaagagtgggcggccgacgtcaaccacaagatcaacgagacccagcggatgctggacgatgagctgtttggcgaatggttcaacacgacgaccgtcgtccttaagtgtgtctctcagtgtctcgcgcgcgcctctcgcgatgcggtctgacgcctcgactgcccctgcagcaccaccgtcgtcgagttctacgccctcgtcaccgatgccgtcaacgtcacgttcggcaacacgatcctcgagccgcccgtctcgaccttcctctactgcgcgtacgacctttcttccagaccaaccagacgcgcgcgctgacctgtccgcccctccaggtatgatcggtagcaaagtcgacgccatcgcgcaggcgctcacctggatccacgaccacgcgcactttatgctgccgacggtctcggccgacgcctttgccatctcgaacgcgacgacggccgcactcgtgacgccgctcgctgcagcagcagtcggtggcggagacgacgacgccgacgggccgagcgtcctccagcggctgatcgaccactacaaggacagccttcgcagcgcccagatcgtcaacggcctctttgtcggcctctgggcgctcgtcgtcctctgcgggatcgtcgccgtcgtgcttgacgcccggcgggagcggcgtgaacgcaagggcaggccggtgcggtcagtgcgagacgccgtcggctcgtggccggtcttcaaagtcgtcggccggcaaaggcgacgccgagtcgacgatgacggtcaagcttccgagaaacaccgctcgggcaacgacggagaggacgactgggccggcccgcagatggctgagaaggtaggctccctcgacgaggcattcgaagcacccgctcgacccctcccgccaacgccccgctcgccctcgcaccacttcctcttctcggcagcgccactcgcccctccacacccggcctcacactctccggccgaccggaccaactcgtactttgcgtgtgacgtcgggaacgagcgctcgtccgcccacccttggctcttgcgcacgaccgccctccggcctgatactggccgcacgccctcggccctctccgacgaccgcgcgggctggacgtcgaggcttcgcgggcggatggcctcgctcgcagccggccaccagtcttcgtctggccgggcgactgatgcagcggtcgccctcccgaccgacaacgaccccttcgcagacgacctctcgcgcctgcccatcgcccaggcgcacgcctcgctcatgggccgaccctcggccggagactcgccctaccctgtcccaccgcgtcggtacactgcccagacgtcgccctaccatgcgatcggctcgccgcgcgacctcgtccacgccagccgggcgacgcccatctttgctcagcaccaccagacgacgagcgatccatttgccgaggagcgaccgccagccggccctaccttgctcggcaaggacccgtggcggagtccgttcgacgacccgcagctgtgattcctcgcctcgcccctgtcgtgtctcctctcccctatcgtccttcatatgcgcatgatccatcgctcaacccgaggtgacagcggaagcgaggatgtcctcgtttgatcgctgccaacctgagccggccgccggcggcttgaactctcggttccggtggtccttgaagccgtttcctctcctcctgcccttgctctccttctcctcgcggagcgcttcgcgccgtgccgcccgctttgcctcgcgctcctcggccgtgccgtcctcgtggggaaacattgactcgtcgacgagctcggcctcgaccgtccgtccgccgccgcggctgtcgatctcctcgttgtcctcggcgctgacgccgggctggaacccgatcgtccgccggtgggcgtagcccgggtagaggctcgcgtggaaggcaaacgaccggaggagcgcgtagcgcggctgagtcggcgggagtgtcgtgttgggcggaggacgctgagcgggcgggagcgacgagagcggcggcggcggaggcggcttgcgcatgagggcgggcaggttcctgagcggccggggaatgtaggatgtcggcgagcgcccgaggcagggagcttgtcaccgaaaaggaagcggactgaccaggtcttgtagggctcggcgtcgcgaagtgtgatgaggattgtgcccttgcgtgcctcgcgctcgtcgtcctcgtcggcccggccgtcaaacgcatactcgccgtccgagccgaggtcgaggtcgagcccttcctcgtcatcctcgtcctcggcagcggcacgctccttgtccttgcccttgcccttgccctttttggcgacctcggcgacccgcgtcggacccttagcaaggaacgggctgacgctccgcaagaagcgaagcagtaaggcctggttgagcgcgacgttccgcgcctggtctttctcgcccgcgccggcgtgcgggaagttccagacgacctttgtccagcctcccggctgcgagcgaacttcggccgtccgctcgaggttggcggcgtcgaccgagaagagggcacgggcgccgagggcctcgagcgcgctgacgttggcggcgcagtcgggatacttctcgtaggcgacctcgcgcgaatcgtaggcggtcgcgaggacgagcgaggccgtcaccggctggtgcttgactagggcgagcgcgaatgagaagttgcctggggacgatgaggggagggagtgacaaggttataggcagtggcgtgagaggttctagtcagcgcgagggccaagtcaagacgagacccgagggtgcagctagcaaggtgggagcgtgaagacgcaccttcgccgacgaggaggatcgattcgcctgcctcgtagggcatgaccttgcgtccgacccgagccttgtagcgcttctccatcgccgaagccgccgcctggaccttctactcgggtgcgccaacagcatggggaggaggtcagtcaggtcgcaggtcgagcgtcgcggtcgctgcctccggcatgcgttgacggacctggtccttggccttctggacggctagcttctggttggccgccttgttcttattgagcgcgttcttgagcttcgtcttcttgaccatcttgaagagcaggaagagagcgagtgagagccggaagacggtcgagctgcctgcccctcgcccggcgtgaaggactgccccgcgcgcgcgtggctgctgcgggccgccgagttcggagcttcgaaggcagcagcagcagcacgtcgtaatcatcctctcgcgcccgaccacgacctgccaacgcgcctcgactttctctcttccttctcgcttaccatgtcgtcaaagtgcgtgccgaccgtccgacgaggggcggaaggaggaccagcttccgccatcgtcccgctcgctgatcccctcgcctttgcccgcgctcagcctcgtcaccgtcagctcgcccgagcactttaaggagctcctctcggccgacctcaaccgtgtgtcggtcctcaacttctgggcgccctgggccgatgtctgcaagggcatgaacgaggtgcctatcgattctcttcaggccgtcgccgcagggtctgggagggaggagagggtgcgccgccctggggtagggcgaccagccggaccggagctggtcgagagccggcggtcgagggctttacgtttgggactacgccccgtgatccaagaaggagctcgtagctatcaagcttgcctgctcgggccaggcggtcggatggcggcctcagccggaacagccggccggcgacttccttgccctcgctctcatcttcagcctgtgcaagactgaccttcgactcacccttatcacggcttgcctgcaggtcatcacgacgctcgcggccgagaacccggccgtcctcttcctccagatcgaggcggaggagcagcccgatgtagccgactcgttcgacatcgaggccgtgccgaccttcctcctcctccgggtccgtccgcctgcctaccgtacgtttggccaccgggcgcgctggctgatagctccttcttctgcaacctccagggtcacacgctcctctcgcggcattccggctcgtgcgcacccgctctctcggcctcgctccagtcctttgctccctcggccggctcgtcatcagcagcagcagccccgctgtcgacgacgtctgcgacgcccaaagcgcccgtcccgctctcggaccggctcgacgcgctcatgcagcgggcgcccatcatgctctttatgaagggcaacccggatgcgccgcagtgcggcttctcacgccagacggtcggcatccttcgcggcgagggcgtcgagttcggctggttcgacatcttttccgacaatgaagtccgcgagggactgaagaagcacaacgattggcccagtgagtgtcaagccttctcctttcacccccggtgctcggcgcctcctctctggcgtctcgcggccacccctctcgcacccctcccctctgccaagtctctgactgctgaccgccctccgctcccgaccctgcatggccagccttcccgcagattattgtcaatggcgagctgatcggcggcctcgacattctcaaggagctcgtcgcctcgggcgagtttggcgagctcgtcgccgacctcaagcccgcctccgactagaaatgcccatcgctcgctgcccttctcccatctgccttctcggtctcctgcttcttcttatcgcattgacgtttccctagtcgatttgtgccatcttgcgagagcgtcaagcgtttgagtagtcgttgaggcgttcagagcggggaaagcgcgctcgagcctcgtcctcagccggtagtcggaggggcgagatgctcgagcgcgcaagtcgtctctgactagctgagaagcttctctgagacgcgacgccagacaagctgctgtctggctgcggttgatcaacgaggtcaccgatgccgggcgcaatcgtatcagcatcgtctaaaccaccactcgatggcctcgctcaggtgcaacgtttgtgtcgaacagcacgctgaagagagatgcgtctcaacagggagcggtcatcatacagtaggagggagcggcagaccgcccccttcgccttccaacggcggcggccgcctcacttgccctcgtgcgcccccgacgcgtcgaaaactgtctgcccgcctgagccaggtgcggccggtcctcctagctttccactgctgttgccggcgaacgatgacgagacgccctcgttgaccgggacatggccgccttcgggcgtcgggacccaggcctgggcggggacggtcgactcgtcgatgccctcggccgcttcgatgacctgtgggcgcgcgcgagggagtcagagttcggcgtcttctcaatagagaaagagcggggggaccgcacctcgtacagcggcgaggcaatctcgggcgcggggacgaggccggtcaggatcgacttcgccgggacggccgagccatagaaggccttgttggcctccttgcgctcgatcaggacggtcccctcgagcgagagtcccgcatagaggcccttcgagcgcgagtacgaaaagacggctgccggacttgcgagggccgactggacagagccgccggtgccgatcggtccggctgcggcagagatggttccgccgagggtgacgttgccgcccatggagaaggcccggacagcctcgtcagagttgaggacgacgacaaagtcctgcaaaggtaagagggcctgcgagtcacttctcctgctgagactggcgatctcaaggctgagccgaaacgcacagtgatgtcggctccgacctggaggatgccgggcgcaatcgtgtcagcatcgtctaaatcaccactcgacgccctcgcacaggagcaaagtcacctgcaagccccatcccactccacccgtcatgatgagactcggggccgaccacgagccgtctggcagcctggcaacgacgacgcctgtcccgcccttgccgctaaagacaaagccggccttgacgacctggaagacggcgagcccttttgcgttgagcaggacggcctttgggatcgcattgagcgccgaccggggcgaggccgggtcggccaggaaggccttgaggatctcggccgctttcaggcactcgccagggaggccaaagccagtcttgatgcctgccgcttgggtcgaggcgagcgaggccgagtcctggaggagaccgcccttcgcatcgaggtcgggagacgagggtcggctgcgcgcaatcagccccggctcggcttcatcgttctcgctcgaggaagacgcacggcaaggaaggtctgggtctggccggctgccttcttggcgcctgcgtgcaggtgatagaccagcgtcagaaagagtcggttgtcgagctcaccgtctgccatgctctggccgccatcttgcgcttcacttccccgcacggaggcgtgatggcggccggtgcctgccgccgagacgtaagaccgaggctgactgaccctcttgcagcttgttgaggaacgacatgcggtcgtgtgtgtgtgtgtgcggggttggattcaggaaagaaggggtcggaaggaaggggggcgagtcgaggttaagagtctgcagccgcaagcatgggccgagggcaggccacaggacgcgtgggctcgcaactcgccgcctgcttgacttcgcccgccgttcgttcccgtccccgtcgtccctcaacagcgactcgcgaagcagttcgttgaacccccttcccactagcagacctcggccgatggcgctcgcagcaggcaagcagctccagccccagtcgccgacgcgaccgctcgacgacctgggcgacatggcctggctcggcagcctcgtcgagccaggcccgcccgccgcgtcgccgccgtacgtccccggtctctccagctgcgagacgacccctcgaagcagctcttgctcttgctcggccgctagtcaaggagcatcctactgaccgacaccctcgtcgcctcctacctcctctctggcgcctctctcatgtatgccaggtcccgcatgtcaccaagctcgcttcagccggccaccgcgtcggccgcggccccgcctcccgcgcagtcggcggctgcgatgggccctcccgttccttcgtcgagctcgccagcggcatcgtacccgaccgacatccgaccagacgtccggcgcaggacgtcttcgggtccggctgcgacgacggcaagtgtgccgccgggcccgatgcctcgcgggcctaacacatcgctgtcggccgcgtcttcacctccgcagccgatcaagcagagcgaacagcggccgtaccctcctcagcagcagcagcagcagccggctctgagcccttcaagcctgtctccgaccgactcgcgccccggcggcttcttctcggccttccgccggacgtcgagctcgcagctttcgccagtcgcaacgtcctttggcggaggtggaggtgggaggctctcaccgacggcagggaccggctcttacgtgcccgtcatcaaggacgagcacgcgctccatcggcggcagtcgctcgcgaagcagctccttgggccgagcagcagcaaccaaggtcctggtctgcgccggacgagcgcctcgcacgagcagatgagcatcactcgcgaggaggaagaggctggcgatgagaagtacgaccctagacgacgtcatgtcactgccgatggtcctgttggtagcgtccggcacggctactcggactcatccggctcgcgctcgacggccgccagcaccagcagctacggccaatatccgcagcagcctgcccactacgcctcggcacctcgtcagcgagccgtctcgtcctcgccctcgatccccgagtacgcgtctgagcccggctggggtccgctcgctggtggccgggtcgtcagaatcgacggtaggctgttccgctttgaccggtcgggcgaccggcttgagctcgtccctgatttgacgccgtcgacagacggctcatacggctctcgtacgtcccggatccttccttgctgcttgagtagacgagggctgacgagggtcaaaatttgttctgggcctgcaggtccgcattcgtccgcttcgtctgcgccatccgctcatcttcctcggcgggagccctcccctcgacggcccgagaccgagcagacgtcccgggcgccgacagactctctcgctgctgctggtgcacctcgcccggagcccagcctccaaccatctacgagcggaaagagcccgacgttgtcggccgacagcggcagcagcgagagattccacggcgacgccatcaacaaccactactcggccctcggcgtcggcctacctctccgccaggactttgcccgcccgcttgccgttgcctctgctgctgctggcgccggatcaaacgcgcctctgccgacgccctcgggccgaccgctatcgcaaccgaccctggcgccgatcgagtctcccctgacggccgtctcggagagcttgtcgatggccgaggtcgagttcgtccagaatgccgtccacggtgtcgctcgcgagcagggccatgtcgtccagttccaggttgcgccgtcggccgcagcagggaaaaccgacgagatggatgctgacggagttggggacggaccaacgccgcctgccgaacggccgagcttcgagcggaagggctctgggcagtcgggccggaccgtcgtctcaaggcccactcgggcaccgcccctgcccccagcagtgccggcccggcccgccggactgccgttcgagggtcgcgtgggctccccgcaccagagccacccggccgttggcagccactcggtccgtacgatagcctcaagctcgcagcggcctgtcccggcacctctcgtcatcccctccgcgacctcggccgacgagcggcttcatccgcgcgatcaggccgccgcgcgtcttgcgagcggcgggcgtcgccaggacgatgggccagacgagacggtcgacgacgtcgatgacgaccggcctctcgcgcaccggctggccaaactccagcagcgcgactcgtcgcctgccgttttgagttcgcccgtcttgggcggtccgtcggaggctggaagcgacaacgagcggcggcaggcgcagcagcagcagcaggcccgcccgcagctcgcggtcgatcagcctccgcccctcccggccaagtcgcagtcgttctcgatcccggcctcgcggacgtatcagcagcatcagcagcagcagcagcagcaacactatcagcagcagcaggagtaccagcaccggcaacagcagcagcagcggcaacagtcgccgtcgtacccgatggccggctggccgagcagcggccacaatgcccatcagcagccgtcggccgaaggcgctccgcgcgatccgtacgaggtgctctcgcggccgatgcccaaggagctcgacacaagcgcccagatgaaggagaagctcatgcggtcgatgacgggctttggcaaggcgcgcaagagcgcaaagtcaaagatggagcaggtacggcccggtcgctcgtttccgccgcaagactctccgtgctgaccgaacacccgtctgttctcgctaggtcgtcgacgcggcgcgccaccagctcgcggcaggctcgccctcgacagcatccccgctcggcgtcccaaagtcgacctcgacgccggcgcatcatcaccaccatcaccaccctcacgctgccggtagcgcccatgcgaacccctatgccaacccgcacgcccagccgcacgcccactcgcactcacgcagcgtcgcgaccggcagtagcgccggtaccgccggcggatcgaccctcgcgagcgctagcgtcgccgcctcggcttcgttggctgcagactcgtcggtcgctgccgctgctactcccgccgatcccgcccccgcctccgcttcagccgatggcaagcaggtacggcagccctccccctctcgtccggcggtcgacggtccaacctttcgacatggccggcatcaagcccgttccgttctcggtcgacggcctctagacaacggcggccaaggtaagtgctctcccgctctctcctctccttcgcaccctcgatgcccctgctgacctagtctgcctgctctccgtcctcctcgcagtctctctcgcgcacatcggcaccctctctcccatcggcgatatccttcgacaggcctcaagaagccggctgggtctcgaagggctctccggcagccctgcttcgactcgggcgacctggtccattggactgagcgctcgattgggccgggcgattccttggttgtgctgtcaacatctcatgctaccttcaggccaacgacaagcgagcgtcttgtgagaaacctccggccgcgagaaccacatgcactgcggttgggggagagggtcgcgcgcttacgcacgcggcagctccgggcgggcacgagaggaacgagtctgctgctcgaccgaccgacgtcctgctcgaccatcttacacccactttcgactcgacgtccccttcttgcatgctctgctcttccggctcggccgccgtccgatgctcgacctgcgccgctcgatgctggcagcccagttcacgagcagcgtacgtagactcgaggcagagccgtcgccctcggctagtcgtcaggcctccggctgacactctccctccccctcgatgcggccattccgatttggcagcagcagcagcggcagcagtggcagagtagcgccgactggtagccggcccaagagagcaggtgcagcccgagcggtgcctcctcgtttcgcgagagagccagaccgagtctgtctcgtctcgacctcggcagcaggctacgcctggtcattcgacgctcgccaagcagcgagctcgtccgctgctgctggatcctcgactgggagatcagttcctcctccgcctccgcctccgcctcgagtctccagcgaggtcctcctcacgaaggaaacgaggttgccggctggaggacggcttgccggctctgcccctcgtcctcgtcggaatcgaacgaccgccgaacgcagcagcccgaccgctgctctgccgacagccagtactcctcgaccgctcttggaagtccgggcacacgagcagcgagaagagacgcaggctcatcctcggatcgatctcgccagcccgccggtcgatcaggagtcgcttgtgccggagcaggcgcgttcgagcgcaacggcaacggagccctccgttgttgattcgccggtcaggacgacaccggcggcccatcctctcgcaggcaaaccttcgctcgctgcttggggcttggaaaggccgctaggctggacggcctcgccgacgcatccgcactatgccgagcgagctttcaggctgcctgggagtcagcgcaggttcgccctgctacaagcggtcgacgccgagctgttgacgccggctggacgcttcgtttcggtaggtttctcttctgcgagacggcatgacgaatcgtcagctgactttccatcctcaaccctgcgcagatcgaatcgaccgaggtcgagaacgttagcactgtccgcatggccttttcgttcgagcacgaggccgcgctgcccttttttcgggcgctcgaggcaagattcgtcgccctacggcccaagatggaccggtcgtggaagatccttgcgggcgagcggccgcctcagctcacacgccgactgcggccagccgactatgcgccgccgatgctggctgatctcgaacggctggtcgattcggtacgtcgttccgaggcctctcattctcgaccgcttggcatgacctgactcctatacatctgtctctcctcgcagtctaccgctgcctcgatcgagtcgtccaaggcagggattcttgcactcagcctgtacctcgcgccgccagccgagtcgggcggcaaccttccgcgcatggctcccgatatcctcaagctggcgcgatcggtcgatgcctgcttgcagtcgcattgtcttgcggtcggtccgggatcctccgcatccagtgaccggacgacctcgatccaaagcatcctctcccaggtctacatcgacctcgacctggcgccagagcctccgaagccagagcacgctgcgccgtcggccgatgttccctgcccggcaacttcagtggccgtcgcggccgagccagagacaaacccctcggccattagaaccgacaggacgactgaagtcgccgacagaaccgacctcgtcctatcgtctgcaccgatgacgcttcaaaggccgctgccgaagttgcccttggccagccgaccagatcggaagccgagcgcgaagacgccgatgacagtaccggaaacgcgaccgcctgggggtctcaacgagaccgcagagccctcgcccccatctctgctcgtcgcacagggcgacctgccaagcccgaccggcgcagagccttccatcgttgccgcccaactctctccgtcgcataccttcacctcggtcgctcccgtcggcgatgcgcagacggccaagcgaccatccggagatttcgagcctcgggcagcggcagcggcggcggcggtatcgggcccggcgggctggttgcgccaactgtttggccgttagagggtcaggcaggccggcgggtccagaaaagggtcgcggatgcggtgctgctgttcttgcgttccggccaaggcccttcagaggtctgcctatagagatggctgccggcgggcatcctcgactggcgtccgaggcacaatcatctggtctgtgtcagggtttgagtgagcgagactgctgcaggagctagcgaaaaaaaggggggcaagggcggcggccagacgaacgtcgctcggcgccgagcgagtctctccgtcggtcctcttcgttgctcctcccctcgaccgtctctgcatcactcccgccacagaacgaggcaggacctgctcccctctgcgattgctcgcttgtggacaactcggacgctgcaccatcgtctatctctccgctctcgcccacctgccgaactcgccttcgccgtcttccgacgagccgaccgacacgcactctcccctgacctcctgccgtcacgaaccgacctcgtctgagccaagccagcccactcaaggtcttcgccatcagcacctgaggcgccccaaaccttcaacccgggttctcagtagcctgccagaattctccttcccggcagatccagcgacgccttggtcccttccgctcagccaacctcgcgcgcgtcacccgcgtccgtcgcttctccgggcgcccaccggccacttcacgcctctcctccacccgcctgccgctcgagttttcgcagagctgcgcagatgcaggacgctgcaggtccctcggggagctcggctatgtacgccggcgagtcgagcggcggcgaggacggcgccaagggtctgaaggagtggtgggggcgcttcaaggctggcaagggtgcctcctcatcggccgcagcggcaccgagcctgccgtcggccaagggcaaagaggtctcgacggagtcgaaaggtgcgtgatctgatccgtctgtccgctcgggtgttgaggcatcgctgcaggatctgacgtcaagctggtcgcgtcgacggctgctccctgcttccctcgcagacggcaagccagtctttgccatgccgctcggcgaggccatcacctacgcttcgattacgatctcgacaccggggccgaccggcgaattctttgtctggggcgtcgtcccgaccgtcgtcgctcgttggttcgtcctcttgggggcccggatgagctcgcgcctaccggcccggcgtgcacatccaggagccagcggagggctgacggcctggctcttctgttcctcctctgacagtgggcgctacctgaaggaaaaggcgaccgaggtcgagggcacgttccgcgtgtcgggcagctcgaagcggatgaaggacatccaggcgctctttgactcgccgcccaaggtgcgtgccgcacggcggctcattccgaacgcttcgctcgactgaccctccctcccatccgatccttctcagtatggcaagtatatcgactgggagaccgtcccgcacacgacgcacgacgtcgcgaccatcttccggcgcttcctgacgcagatgccagtgcgcaaccagccctttctctgccgccctcccctcgagactgcgctgacgtccgtcgccctcgctaggaacccgtcgtgccagactcgttctacaaggactttcggtcgatttatagtgcgtcccgttgtcctcggtcgacactgctcacggcggcgccctcgactgacccctccgctcgctgtaccttgtcccagcgcacgagccgttcgaaacaaagacggccgtcgaacagtacattgcgctcatcaacaagctcccggtccccaacaagtacttgctgctctacgtgctcgacctcttgagcgtctttgagaagaagtcagacatcaacctgatgacggcgaccagtgcgtgtcgattgggcgcgaaaatttctctcaaacgctcgtcctgactgcttctcatcgcggcagacctcgccgtcatcttccagccgggcatcctctcgcacccggaccaccacatgatcccggccgagcacgcgcgaaaccagaagatcgtcgagtttctcgtcacccacgtcgacgactttgcgccgctgcttgagtcgcggctcaagaagaacccttaccgacgcaagccagccaaaacgcgcgaggccgccgacccggcggtggccaagccggcgtcgacctcgtcctcgtctggccggctgcctttcaccgctcagacgccggtccggccggcgatgccgacgccgcgggcgacccggctgtcggacacgtttgcggcttccgagagcgacgacgacgacgactttcccggagccgtcattgtccgcgtcaacgacccaaagctcacgcaggcggccctgctcgcccggtcaaagtcgacgacgtcgagcaacaagagcccgcgcggcggcaaccggcgtgtcagcggcaaaagcgtgctcgacgatctgtcgctgacgcctgcgacagagccagcctcgcccggtgggctctcgcaaacgagcgtccgacggcgggccacagcgccctcgcggaggtcggcgacagactcgagcgacgcccggcgacgaaaggctaaggaaggaggcgactcgccgcatccttcgccggcaaaggaggtcgccgccgcatgagttgtcgacagacagtggttgtccgacctttcgtcgtacgcagcccgtcgctctgcaacgcttcccgtcacccggcctaccctgcccagcctcccgacctaccctgcccagcctcccgacctaccctgcccagcctcccgacctccccgtgggcacctcggagagtggtcacacgccaccctccctccagcccagctacccctggaatcgtcggcccctccgcacgcaaggctcctcgttcagcccagcttattcagccatcgccgccgccgcaccctcacgatccctcgcaccgacacgcaacaggacgctcgctctcttcatacccaccacataatgttctcctcgcagtttcacttgccttctttcctgtacctcgcctcccatacgcacgcatcgctctctccctccctgctcctcacctcgggtcgcccgtcatccgtcgcggctggtgcctttgctgcggagcgtccctcctatccagcaaccttccctccgccctctaaccatcgtcatgaggtcctcgcactggcctcttcctagcctttaacgctggtctgccaggtctcgacagtcggggcgagggaggtgacatatggtctgaaccgacgacgaccgacttgcgtctacaagctgagagcggctgcggggttgtctgtctctccaccactgaccgccacctcgactcctccctctccataccctccatctcgcttgacgccacattctcatcgaatcgacctcgagagcaacagacgctagaccatgggcgacgttgaactcacgcttgaggagaccaacaagctccggctctcgctcggcctcaagcctcttgccgacccggcggcacctctcgccgagggcgaagagcccgagctcgacccagagcaggtggctgaagctaactactctcgcagaagggaggaggatgcaaaggctgccgaaacaaagtacggccggccttggtctcgactgattcgtccaggatggtcgtggacgagctccctccctccggttcggaaggctgaccctcttgacgcctcccttgcaccagactattgcaggcacggatcaccaagtgcgtgccattctgatccagtcctgtgagcagctggatcgtgtgctgaccgatgtgatccgcctctcttgcgcgccgccacagggctcggaacaagcgggagctcgcggcccagctcaccggctcgacgctcggcgaccagccgactgaggatgcagcggcctgggccaagaaggctcgaaagcgggcaaaggagctcgccgccgagcgggcgctagccgccaagcgcgagcaggagcagctcgagctggatgagctcggcaaggccgacctttactctgagagtacgtctcctcactgcaccatcgacctcgctcagtatgccgccgggcgtcccgccgagtgactcttactgacttgctgtctatctgcccttcaccagaagatctgtctggcatcaaggtctcgcacgacctcggtgattttgaggagggcgagcacgtccttacgctcaaggatgctcggatcctcgacggcgatggtgattcgtcccacgctctgcgcaccggcacagcggcactcttgctgacccgaatctcccgcttgtcgcccttccagaggatgaactcgagaacgaggatctcgagcggctggcgcgcgacgccaagggcaaggagcttaagaagaagcagcccggctactcggggtacgatgacgacgagtttgacgagggcagggtcggcatcaagaagaaggtcctcagcaagtacgacgtcgacattgagggggaggctgagtcggtgtgtcttaagggctaagaacctgtctccttatgcccgctgcggctgttaacccgaatccctactttgctccctgccagggctttcggctcggcgggaatgtcgcgccgaaagcaaagcggccggcagacgagctcgaggagggaggcgacgagaacgtcaaccgaacgctgctcagcggtggtcttgcctacgagagtgcgtgcttgccctctcattgcccagaatggcccgcttcaagagctgacctccctccttcggacgtctgcacgcagagaaccaagaggtatcggactacctccaagaaggcgatgccgggttcaagaagcccaagaagaaaaagaagcgctcgacccgggtcgtcgaggtcgacgaggagcgcgccccggccgtcaaggtcgaggccgacgtcatggacgtcgacgacggcccgatcgcgagctcgtcgcgtttgccgacccctccgccggcgattgagaactacgtcgacgacgacgagctccagtcggcgcttgcccgacagcggcgtcaaaagtcgcgcaagacggccaagctgtcgcccgaggcgattgctcgccagcgtgcgcccgtcgccccttattgcagtgacatccagtcggctgacctcgagcgccccgtttcttcgccgccagtcgccgagcagaaggccgaggaggaagcttcggccgcggttgcccgggcatcgcaggctgcggccaaggtcgagcaggacggcgacgaccagattcagtttgacgagacgtcggcgtttgtgcgcgccgtccagatgcagccggtcgtccaggtgatccggacctcggcggccgagccggtcaatgctgtcgcttcgtcgtcccgagtcaagaccgaggcggccgacgtcaacctcgacacgctgatggctcaaggccaggacgtcaagatggaggacgacgacgagcccgaggaggaggtcgacgagcagctcgccgagatggcgctccggcagggcctgtcgatcgaagagatgcggctcaagctggacgctgacctcgccaaggccgagccggaggacgatgccgaggtcagtggctgttcaacttgggttttcctccgctttgtgccgaggcgctgactttgcccggcttcctcgacagattggcacggcgtccgaggcggtcgtcggcaagggtctcgccggcgcgctcgctctgctcaggtcgacgggcaacctcgaagccaacgcgggcgccgacgcgagagagcgcgagcggcttcagaaggagaaggacctctggatggccgaccggcgtcggaggctggctcagcgcgagctcgagcggatccaggcccggggcgggaacaaggaccaggcgacgctcgagtatgacaagcggatgcgcgagcagcgggaggcggccgacgcggtcgaagccttcaaaagctacaagcccgacgtcaacattgtctatcacgacgagtttggccgcgagctgacacccaaggaggcctggaaggccctcagtcatcgcttccagtacgtgcctgtcgcttctggtggtcgcgggccaaccccttgttgaccaatggtcccttctcccgcagcggcaagggctctggcgcgggcaagaccgagaagcggctcaaggcgatcaagctcgagaagaagcgcgaggctatgtcgatgggcgacacgagcctgagcaagaacttcaacgagcgcgcctcgcggacgggcgaggcctttatgattcttagctcgggtaacaaggcgtgcgtctttccgactcgaggtttgccgctcctcgcaaactaactcatctctcgcgccctctccagcaccgtgactgagagcaatggaggcaagaagcgcaagtagatgcgctgcgaacgccgctctgccatcgttcgccaggagcgcgctgccgacgagaagccggacctgcgcgatgtcatgacgatgcccgcgtgttcgccaagctcctttcgagcgtgcctgaccgcgagctacaaaggggatggcatcatagaaggaggccgatcatgtcggccgggatggccatcggcggaacggcgtctgttgactcattgtcgtcggccgggccttggttccggaggcgaagcgagacgaggtactcgcggtcgtggagctaaaagggacgtgtcagccaggcaggcgtcagcagagcgcgcgttgacagtcataagcagacgaaccttgccgacccaagcctcgagggcgacccaggcgcgacgggccgcaaagtagccgccgaaggcgagtatagtcgctggatgggcgaagcggcctggatgcagaaaagcagaggagagtgcatcagggaagagggcgcacgagccgtctagcgatcgagaaacacgcactcagccgggcattctgcgcgacgtcggtcgagcccacagagcagagcgcagcgaccgcccaagggccgacgaccactgcggcagcggcagcgaagagcgggccgagcagccggcgcgcaagccgcttcgcgttccatcggaagcggtggtggccgtaggcgaagtcgagctcgcggaggaggtcgagcggcgggagtgtcggccggagccggacgaggcagctaagcgaaagggcgccgagcgcccagacctcggcgaggtggatgacggctgggttggtcgctgacgagcggaacggcaggaggagggccgtctcggcgacgaggccgacgatcagcgggacaacgaggacgagggcgaccgatgcgaagaggccggtcgcgagggagcgcgcgcgctgaatgagggtcagacgccggatgaggggccgcgggtcgcgcttggcgacttgccgggcgagcgtccagcggcggaggacgatctcggtcgtcaagccgacctcgacacagccggcgaggacgacgccaccagtgaggagggcgtagccgtcgtgcgcgccctcctccccagagacgagaccgcgtagtgcgagccggccgataccgacggtgccgacggcaagggcaccgacggcgaggcacgaaagccagagcgcgccaaggaggaggtagatccgactccggacgtggcccggcagccagacgatgccaaagtcggcggccggatcgcggccggcgtcgaccgccttcttgttgatggcgacgagcagccggagctcggccgcgtcgagcggggcgtggtcggcgtcgagtcggacgaacatgcgccgggcggggaggatccggaggtggtcgaccgcagggacgcgcgcccagccgccgacgccctccatgaagtcgcgccggccgagaggggcaagccagcggacgagtcggtcgaccgcgcgcttggcgggcgtatcagtccggtcgcgaaggtcgggagctgcagcgatctgcgagcgcgaagccagctcatcgtcgctgccttcgccgtcgtcgtcgcttccgtcggcccaggctgccagctccggggcgtcaaagaagtaggacgcgagccggagggtctcgaccgtcgccgacagccaagcgatgagcgcccgcttgagccgggcgagcgggtgcatgcggcctacgagcagcggcatcccgagatggaggaccaggaggtcgagcgggatctcgctcagcggcggatagccgcctccccaccggagggggagcccagcaccgcgcgggacgacgacgacggccaggcggagcgtgaggccgacgaggccgacgcagctgccgagcatcgtcgcgtacatgccggcgctgatgaggagcttcttgagctgcggccaggtccgcttgaagaggatgtcgttgaccgggttgaaggccgggtcagacgggtcgcggataaagaagaagacgccgggacgaagcgccgtccggccaaaggcgaggaggttggcaaagccgaacctgggaggcgtgggtgcaaaagtcagcatctgcgggtttgatagggtgaagaagagggcgaccgacatgaacatggtgccgagtaggacgtgctgaccgacggcgacgaacgggtggccgccgaggatctggaagtcggcgagcgtcggccggtcaacaaagagcggcagggccgagaggtggaggagagcgccacaaaagaaggggaaaaggacgagctcgatgagcactgcaaagtgagaaagaaggtccggggaggcggaggtcagcgcgagaggctggcaaggcatttcagggccggcacgcactgaagatgccgagcttgacgaccgtcaccgccggctcgagctctgcctgaactgcccgcgccgtccggatcttcagccgaaagacgacgccgacgaggcaagcaatgacgaggtagcccacgccgacggcaagcgctcggtcgccgacgctgtcgccctggcagaatggaaacagcccgacgtcgtcggcctgcgcgagtcggtcagggagcgtcgacaagaggtgccagacttgctgcgcgacgcggccgagcgaggcgagcgcagggccgaggatagcgtcgtcgtcgaatgagaggcggtcgatggtagaggacacccagccctgcagggtcaaaacgggacgcgagttgcgagtggaggtctcgttcgaagcgagcggcaggcggccgaggaagctcgtcaggctcgctccgacgctggtaggcagggagtcctcgagccggccgacgagcgccccaaagatgcctccttgcgtgcgcgccgccacctctgttgccgccttgccaaccgcgcccgtccggcccctcgccgcaagcctcacgaagaacccaacgaccgggtccgtcgtcagcctgacgagtgcgacgggtgcgagcgcaagcttcgccgcggcccggatgtcgacaagcaggagcgtctttccgaggacgagcgggagaaagacggcgagtgcgcagaagaacgagacgacgacggtgaggatcgtcgtctgccggcgatccgggccgaacgaagggtgagaggaggtcagcgagcgcagccgcggggaggaaagagggtgagggaagggggacggacgttttgtagaagaccggtgagcggcccgcgcaggccggccgcctcgagcagcccgtcaatctcctcttggaggagcgctgcgttcgccgggtcgacctgctcgtcctccccctcttcctcctcgccttcctcgacctcctcttccggtccctcgatgtcgttgaggccgatgccgccgacgccgtcaaagccaaaccgatcatcctcttcgtcccgatcaataaaaccctcgctcgccgctccctcgtcctcgacctcgtcctcgtcgtcgacaggaacgccaggccggaacagccccagcggcatcaacggcgctgggttgggcccgccgcgcggcgggggcggccgacggcggccggcggcaggggcggggacgaccccagcctactcacacacctacatcacacacgttcccacccggaccgccgcacgtcgtcgaagccctttccttcgggaaactgaccgcgagccctctctcgtctccccctaaccgtcccctcccctcccctcctcgcgaaaatgtccgacgttaccagcgctgcagccggcgacgcctcttccaacaagcgtccgctctcgccctcgccagccgacggccagggcgccaagcgccagaacctgggcggggccgaggccgacgatgacgacgacgacatcacggctgatgacaagccgctcgttggaaaggctgcggcggcgccgggcgaggacgtggcgatgaaggacgagggactgtcggctgcgtgcgtccccctgttagacgacttggcggttttgcccgctcaggttgctgacgtccgtcgccgcctgcctctgccttcagcgctgctgctgccgctgctgccggcctgccgcctcctcccccgccccagacggccgaggccgccgccgcctccgccgctgagcagcccgccgccgaggcccaggtcacgcagcagatccagatgcgctgcctgatcgtcacgcaagacgcgtccgtcatcatcggcaaggccggcaagcacgtcaacgagattcgtgagaagtccggagcgcgcgtcaacgtctccgagtcgatcccgggcaacccggagcgaatcttgcacgtctctggcccgcttgacgccgtgagcaaggcgtttggattgattgtgaggaggatcaacgacgagccgtttgatatggcgtcggtccccggcagccgggccgtcaccatcaagttcatcatccccaactcgcgcatgggctcgctgtgagtcggcccctctcgtcctgcgacggcgtgggttgcaggcgctgaccctcttcccctcactatcggcaggatcggcaagggcggcagcaagatcaaggagatccaggaggcttcgggcgcccggctcaacgcgtccgaggcgatgctccccggctcgaccgagcgcgtcctctcggtcgcgggcgtcgccgacgcggtccacatcgcgaccttctacattggcaccgtgctcgtcgaggcggcatcgcgcgcgggaggagacaacatccgtggtggcggaggtgagtaccggggtggagcgcccggcggcggcggcggaggcgacagctaccggccgggtgctggcggcatgggaggcggcggtgcggctggcggtcagggcggccgttttgagcgtcaggcccaaccggttgagctcaagccgggaatgtcgacccagaacgtctggatcccgaacgagctcgtcggaccgagtgcgttccttgctcgcctcatcttatgctctggctcgcgagtcgaaggactgacgcctcgtttctcttgatgccctcgctcgcgccagtgatcggcaagggcggcgccaaaatcaacgagatccgccaggcctcgcagacgcaggtctgtccctcccccctccgactcttcttattcagagcgtgccgctgactttgcccttactttccttgccatccacaacttagatccgcatcatggagccccaccagcaggagccgccgaacccgaacgagcggcttgtgacgattgtcggcatgcccgagaatgtcaatgcggccgtccagatgatccaccaggtgcggcttggctcgtctcgtctcgtcttgtctcgtctctcgttacgtcagttctcgcgctgaccttgaatcccctgtgtctgatgtctcgcagcgcctcgagcatgagaaggctcagcgcctgcagcagcagcagcagatgatgtgatctcgcttcgtgcaaggagggcgctctcggctggggacacgagagttggaatgcaatgacctaatgcgccagtcacaaacgagagaggtgctggtcgagtcggcgctcgcctgcgtgagagtgtcaggcggtcgatgagctctgggctttgcttccttgtcgacagctgctgcttgcacatgtgaaggcggcggtcggcccttctgcttccgctgcgcgccggcgtcgtcgctccagcgtgcgatctccctcccttcccttccttctctcccgaccatcagccccgccagaatcctttcttgcagtttctacccagccatggccccgccaggcatcaacctcatcacgaccgttgcttcgcgcctatacgcgctcgcgccggcaccgccggccggcctgcgctttcactcggcaccgctgccgtcacctgagggcggggcgtcgtctgcttcccggctgggcgagtatccgtgcgagcgccaaggcacgacgacgattaacgagggcggtgactggcctagaggagggcagacgggttgcacccctgctgctgttgctgccgctcagcggctcgagccgacccaggcggccgagagcagctcgaccgttggcggcagtccgtgggacgacgacgcgggggacgtctcaagcgaaggaacggccaggcagcggtcaaccgagcggccgggcgctcgctttgaacagaaagagcaggcgaggccagctcctactgctgcgactgaggctggagctcgttggcggcgggacggcagcgggaacagcagccatgggagccgggcgagcagcttccggagcgtccaggacggactgttcaaggctgagcaggacgctgaggagcgggacgaggtccgggcgctccatgtggcagacgacaatgacggcgaggacgacgacgacaacgatggccggtcggacgacagcggcgagtcggacgacgactgcgtcgtgctggtccagagtccgtccctcgccttcgagcgtctgctcgtcctgagctgacgccctacctgtgatttggcagcgccctaccacatcattcttcgcaactatgcgcttgtgcccgtcctttcgatcctcgcgctcgccggcgtcgtcactgctctgactctgggatggtgcgtctcctcctcctccttttagcaggcctgaagttttgaccactgaccggattcccgctgctgacgagctgcaggccgccgtccgtgcactcacccgacacgtatccgcaccggccgatgtggcgccaggcactgtttggcctcgccttccactccctctcgcacgtcagtcggatgaggacgccctctctagttgactgtattctgacgagccttttgccacttcctcgtcctctgatagtcactccgaatcccgctttttcagctgcttgccgcgttcctccccagtcgcctcctccccgcggcacacaccgccctccacacgctcgcgctcgagaccgtccgcttcggcgcgctcatcctcgtcgtcccgcggctcgagggtgaagaccagtggcgctggccggacgtctggcgccagtggccggcgtttgccgggtcggtctggttcggcctcggttgggctgttggcgaggttgcggtcggtatctggcaaggtgtgtgtttttgcgtatgcgcgttgctcgccatgtagactgaccgatctgccttctcgtctgccctgccttaatcaggctaccgccacctgagcttctacaagccggtcctcccttcgcgtgagcgagcgatcgccctccgcaatcccgacgaagaaatgcgacttgcgaacgggagcggccagccagatgaccggtcgttcaatgacgactatagcgacaacgacgacgacgatgacgacgacggcctcaaagaagagtcgcgcctggccgaacaggtctggcagctcattgccgtccagaagcgtaaagaggtcgaggcggtcctcggtgtcccgctccctaacatcccttcgatcgtctcagccctctggcggctggattcgctctttctcgcgctcggcatcaccctcatcctctcggccttgtacgcccggcacgaggacgacagcgaggggaggtacctcgtcccgcctcacacgttgccgctctttgctgccgtcgctgtcggccatgctgccatctcggtcggatggctcgtcggcatcaagatgattgggggtgcgtggcgtgcgcagctacgtctgtaccgtcgttgagctgacatgcctcctcttctcatcgatcgtccgcagcccccgcgacgacctacatctcactcctgattgcgctcgggaccgtcgtctggggtttgctcagctggggcgcactcgtctgagggcgaactcgagcgatggcgcactcgtctgagggcgaactcgagcgatccatgccctgctttcacgacagcggctgccgtcaatcgcaagggaggccgccgcttgcaaagacattaggataaagctacatcgtcgagtagatcgtgtcacgagaagggcgggtcgcgagaggggggccagggcaatcaggcccacaggaagcgttctgcacgggagagcaggcgtcagctaggttcagtgcgacattgcccataggggtctgcaacgtactgatgccatactcgatccgcgagctccagctcgtctcgcgctcggcctcgcccaagctccggacgtcatcgtcgacgacaaagcgcttatcgccgacgtcccagcccgatccggcctcagaacactgcagcttgagccgggtgacaatgtggttaacggcctctttgcaagtacgagcgtcgtcctcggtctcgtcgtgctcgtcgtcgttgttgccagtcatcgcaccgcgcttggccgacggccctcgtcggcggagcaggcggtcgcggctgatacccttgaaggcaaaatattgaacgacgtccttgactggctcgagcggcttggctgcgttgagcacgagcgggcgcagaccacccgacaggctgccggaagacgcgcttgatggcaagccaggtcgagccgattccgatttcgccttgcgtggcgaggacgagggcgtctggtcgggcgttgccgtctgccgctcgttgcgaatcgtgtacgatgtgagccgggtgtcgtcggccgagccccggaagaacagcttgaagccgtagttctcctctgcatcctggctggcctcctgtaggggcgagaggatgtaggcacccttctggattgactcgatgtggccgagcgggatgctgccgaacgggtcctatgtcagctttactcgccgctgtggggtgcgtttgctcgccgggacgcaccgggtgaagccgacgaccttctccaggttaaagtcgaagctgcagacataggcagccttctttgtctgcgagcacgagggagacttgtggtcagcgtctcagcgtcataatcaaacagtgttgacggggcagaccaggagcaagatcttctcttcgaactctgcgccgccggtcgtgttcatctcccgcggcgaaaagagggtccagccggcgacacgtgtctcgccatcttcgagcacgcgcgaggtgcaggtctcgactaggggcgacgtagaagaagagagacgtcagctttgttggcgaatctggaggctcggcagggtagacggaccggcttccgtgcggatgatgctcagccggaggagattggacggctcggctgtgttcatcttggccatgtacctaggacatgggcagtctccgcgggtcagtcgccgcagcaagcaaggccgcttaggggtgacgcactcggaggtgaacatattcttgctacggtgaccgagcatgtagtcgatgacggcctggctccagaagtcagaaaaggccgagctgcagcaaaggtgcgtgcgtcagcgtattcctttcaaaagcagacgaggcgctgaggacgagagttggacggacgagtacatgcgtgcaaccgaattgaggccgtcgttgagcatgccgtgccagtcgcgctttccagtcctgatgaaagcttgccggtcagcctcaagaaggcggatcgatggccacgggccaacgcacctcgtaaagtcgcctttgagagccgatgtaccggcatacgagcgcgagatggcgtcgccgttattggcccagactaaggcagaaaaggctccgtcagcgcatgacatctaaggggacagcaagcgtgtggggagggggcggaccatcgttgaagacagcttcgagttcggttcgaggcccgctcgaggtcgtcggctgctggccgagacccacggacgacagctggaggcccagcacgtgccgtgcaaacgcagattggacgacgttggttcggtcgaggcagtcgatgcagttggtcctgaaggtgcccttctgcgtttggacgacagcgccgtctcgcgtctcgccataggcttgcgcggcaaagaccttgtccatctggtcgacgagcttggagacgttctcgaatcgcatgcctgcgaaggataagcaatgaatgtcagccacggagcgttacccttgaagcgcagctgagaggaagcgcaccttggcactcgtggtgaaagtcaaactcgcgccagtggacgtcatcccttccaaggtcggcgacgagctcgcggtagccatttgtcacggcaccctcctttccggctacctcactaagcgagacgatcgtctgcggaccgtaggtctgaacgaggtgttcaaagtgctgcgtggccggcccggatgctgcgaccgagggtcgatcgagtgtcggagcgggcttaagcgacagctgcgacgaggcagagtagggcgattgactccagaagagcgggactgagtagcatcgcgggagaaggatcagcgacgggaagaggtgaacagaaggcggctgacgcactcgagccgcggacctggagaaagctaaaggtcgccgagcgagtcttcacgatctgctccgactcaacaaagttggcgacgtgaccgtcgtcgtcgatgccctgcgagtgagagaaacaacggtcagcgcttttcatgtttactctctgcaacacttaggttcgcacccgacgctgatagcggagaccagcacggtcacggctccggcgagagacgacagcgatctcaatctcttcgtccgttgattcgccagcctcctcagtccacgcatcggcgtcgaggcgggccaggtgcacccggcgtgtctgaataaagccttgcatgacaggcaggacaaagctgtgtgcctggaggttcgaaatgtgtgtgtcagcacggccgcggccagcgggtcaagaggtgaagggggaccaacgccgatctcggtcaagtcgttgctgagccactcgttccaccagaactcgcgccggaccctcctccagagtggcaagccactcgagccgccgggagcaaccccactgacaccgcctggcgtcacgggcgagcgagtaatgtccgtgtcgtacgagaagaagaactggccggcgccaaagagcgcgcaaagcgagtcgaccaccttgcgctcgagtgcgagccgggtctctgagacgtaagcagtcgaggacggagttggggatgcgggctgagtagcaggatcggcagggccctgctgagtggcagatggcgagggatccgtggtcgactcgtcggcggccctccgctgcgcatcctcgctgccggaagcgggcgtcttgggcttcggagaaaaagggttccacttgagtgagacgcgcttgagggctgcgaggtcgagaggcagatcgatcgtgctggccgtggcgtcgtccttaccgtcggcgctggcgggcgtgctcaccccggacgcagcgcccttctcatccgccgctcgcggggcgaacgggttccaagggaagaagcccctgtgctccttcgaccccggaggaggagggtgaccatcctgctcgagcgcgtccttgagcgcctcaatggccggcgtctggacctcgcccgagcgcagccagttgctgtcgccctcgtcgtccgagtctgagtcggcgtctgagccggccgtagcacgctgggctcgggtagctactagggcagatatccgctggagcgccgaggcggcctcgtctcgctcaagcgcgatggcctggatcgagccggctgggagattgaagaccggggtctgaccattcgggactgcgcaattgaggcaggcggcagcaggccaggtcagactgccagcagtcgatcaggagcgaaacaaagtcacgtacgcggtccgatgtcggtcggatggatgacgacgagaaggtaggccgctagtagatgcaggaagcagagatcaaccgaacgaccagccgggagcggtggatcgacaggggaccttggcgcctgacgctcgagcacaagacaaacgcaccagaccacagcctgacaagtccgagcagaccccggatctcgagctcgtcggtcccttcgtctgcagcgtgatctccggcgctgtcatcgagcttggccacggtgccgtctcggccccagcggacgaggagcgagcccgaggtcgggtgcgaggctgggccgatgacgaggccggccttggtcgcccggaggaagaggtgacgatggactcgcggcgggacaggagggacctgaagcgacggcgggagcgagcctctcggagacgagctggtcggcagcatgctgggatgggcgaggcgatggcggttcggaggggccagcatcgtaccatcgcctgcgcgaagagacggcgccggccgagagaagacgtcggtcgcctgtctccgacgtcgaccatcttccgccagcccagacacaatgagcacccaggacatctcgtgcgcggactgctactcggcctgtctgtgcgctcgctgaccaattcttccgctgcccatccttgcgtcagctcaatccttcaaggcggctacgcccacccgctctcgcgctcgtggcagagccagagccgcaacctgactaaggagatgctcatgtacccgatcttcatcaccgatgacccggacgagtgctcggtcatcgagagtttgcccggccagaagcgctggggcgtaaatcgactcgaggaagtgtgtgcctcgccctcctgcagcgtccaaagacggtcaggctgacatgcctctgacccctcgcatccagttcctcggccctctggtgaagaaggggctcaagtcggtcatcctgtttggcgtcccgcataagctgcagaaggtgcgtcaaggttccccaaggcgactgtcggctactgaagacctgttcgccctatccttaggaccccgagggttcgaacgcttcgtcgcccgagacgcccgtcatcctcgcccttcgtctgctgtcaaagctctacccgtcactcttgctcgcgtgcgacgtctgcctgtgcgagtacacctcgcacggccactgcggtatcctccagcccgacggatccaacacgctcgaccaggagaagagcgcggctcgcatcgcccaggttgccgtcgactatgcaaaggcgggcgccggctgcgtcgcgccgagcgacatgatggacggccgcattaaggccatcaagcgcgggctcatggatgccggcctcgccaaccggtgcgtcagggtcgtacgtagtcaggatgccggctcagactgatcatccggcccggcttcctagctgcctcctcatgtcgtactcggccaaatttgcctcatgtctctacggtcccttccggtgcgctccagccttcaccagaagattagtcctctcgactgacgcgatcctctccccttgcagcgaggctgccggctcagcgccctcctttggcaaccgcaagtgctaccagctgccgccggccgcacgcggtctcgccaagcgggccattgtgagccgccagtctctcagacctggcctcgaacgtctcgctaacctttgccttgccgccaggtccgcgacgttaacgagggcgccgacatcctcatggtcaagccaacgctgccgtatctcgacattctctcggccgcgcagacactcgcacccgaccacccgctggcctgctaccaggtctcgggcgagtacgccatgattgtcgccggcgctgacaagggcatctacgggctcgaagagatggtcatggagacgatggactcgttccttcgggctggtacgtccctccccttgcgatctctgcgcgaccttacgctgatgccttcggctgttccaggcgcgaccgtcgtcctcacctacttcacgccgctgctgctcgacatcctcgacaagcagagctagatgccaatcatgtcatgtgtctgctcgcagtcggagaattaagcgtcgaaagctgccgccagagcccgctttggccgcgtgctggggctccgtactcttggctccgacgtcgtgcttcgacgactgccttggacccttttgcttgcccgctcgcctttgccttccaaccatcaccctgcctgcctgtcatgtcaatctctgcctcctggacccgcatcaagccctcggtcgcgctcgaccgctcgtcgctcgccgtcgccatcgtcggagacgctgccttcgtctttggcggcgagctcaagccccggacgccgctcgacgctgacgtccacatcatcagcctcaagggtgcgtctcgcaggtcgagcagggcgctttggcctcgcatggacttgagtcgttgggctgacggccctttgcctttgcccggcagatggcaaggtcgagactgtcagccgcccggccgacgcgaccgacgccagctggccatctcctcgagttggcgccgcctggaccgctgtcggcgacaatgtacgcctcgcagcctacgatcaaagctggataagctcaagctgacctttttgcctctagctctacctctggggcggccggggcggcaaggcgatgacgccctcgtctggcgagctttggcagtttgacacgaccaccaaggccttcagcgtcgtccctgtcgctgcctcggccgagggagagcagccagaggaccgcagcttccacgtgttgacgagccacaaggtgcggatgggcgtgatgatgaggcggctgcgacgcgactgacgccgcctcctctccgcaggacaccctttacctgcacgccggctgccccgccaagggccggctcccaactctgcactcgctccaccttgcttccgagtcgccagtctggaagcagctgtcgtcggcacccggacccggtcgtggcggcaccaacctcgccctcattccgctcgccaagccgacgttcgctcggttcggcggcttcgcaggtgtgctgggcactccctttcagctagggtgagcaggggctgacttcattaccgtctctgcgtcaggccacgagaccggcgactttgccatctttgacgtcgagagccagtcgtggtcgtctccttccctcgctcagtcgggcgtcaccccctcagaccgatccgtcgctggctttgttggcctgcccgctgctcgcaagctcgcctctggggcttcagtcgttgctgttcttttcctcggcgaagcagagagcacgacgccagatggtgtgacctgcgcttcgacgcccaatgccttcgccgctgacctgcgacgctcgccctccccctcgcagtcggtcacgatggcgccggcttcttcgccgacgactcgtttgcgcttctctcgcacccgggcggttccttctcgtggcaggcgctcgacatcggctcggagcagcgccccgagggcctcggctggttcggcgccgattggtggcggaacggcgacggcgcggtgcttgtcggcggccttcacaccagcaacgagcggcgcggtgacgcctgggtccttcagttgaaggaggagtagagcgaagacgcaaagaaaccttgtatcgcatgcccgctggcgagagagtcggatggggtcgtggttgaggtcgagctgatgtttgagtggcgctttgtcggtatgaggggcggggcgccctctctcgtccatcttttcaataagcgcctgtctcgcagcgacaagacgaagcatgtgaacatggagcatgcgatgtctgcctgcggtcatgcgcaagaagcagcttcgcacaggctgcaactgcacgaacaggagtgcagggggccgttgccgtcaacagcgcgaggagtcggccgcgggactggagctggagtgttgagtttgagcgccccatccgcccagacttcgcggtcgtgccggagcctagggcgcctggtgtgcttctacgtggctggatgttgttcaggcagcaacagcgatcttgactgctcgcagattgggcttcaactagggttagggtgtaacgggcatgcaatgacaaaggcgggtctatggacagaaggcgaggagttcgagagctagacgaggggaggagacggaggcggaggaagggagcgcaacttagaaggcgaagaagcgagcacgcgcccggagaagtgacagagagaggaggcgggagaagagaccgtacgacggcatgagggcgcgccagtggtcgaagagggggacagaggcgggggagagggtgccggcggtagagagaacgagagggaagaaaggggtggcggtgcgaccgaggtacttggaccgcttctcgttctcgaccaaggtgagcggggcgagaaggctggaggcgcctccaccgccgccgccattgaacccgccggcggcatgaccggccgttccgcccgccgccgccgccgtcggtccgcccgtggcctccaggcccaaaggcctcgggacgtactcgagttggccgacaacaagcggccagaccgcttcgaaccctgcgtgttgcctcctcctcccgccgccgctgctgctggtgctgggctgggcgaggccagagcggagctcggaccagatggcgttgagcgcttgagtctggcggatgcgctcccagttctgagacacaagagccgaccgccccatcgcaccatgatcagcaatcgcagcaaaacgggaggcgagggggaaggggcgggcggaccaagagcataaagtcgacgtggacctgtcggagatcgtcgtacgctgcagcgaggtcggtgaaggcctcgtaggcgatcgtctcgaccgagagactgtcgacgatgactgccaagaagaggggccgatgagatgaatcgtcagcaattaggcgaaaagggacgcacatgcacggggacacgcacacctgaacgcctttgccctcagcacgccgagccccatcttgtccgcgaggacaaacaaactcttcgcgctcgccggccgcggtttccccgggtgcgccttgacccagccgtcgatccactctgcgcggagtcggaccgcgccgcgttgggggttgctgcttggtgcagggccggcgtggggcgaggacgagacgaatgagcggtaggatgaggatgttgaggactgagggacgtgcgtcggccggcggtgggatagcgactcgtctgggccggtgctggagacatcggtcgcggcagtagtggcggcgcgaaggaacgacgaggtaaggggtgcaaaggtgatggtctctgtgtaaaggaagtagaggagcgcaaagtaggtcggatacgaggcgtcctggcagaagacgccagagctcatcagtcgccggctcagggtcgactgcgaaggctggctcgacgtactcggatgacgacgcatgccttgcgcgggccggctcgtgcgcgaggagccggctcagcgatccccgcttggcgtgcgctcgtcgacaccttgccgcttgccgagtcgccatcgtccgatggacctgcgccgtgcggtgcggccgttgatggctgctcctcgtcgcaacccgagccgggcgaggagagcaagctcgagggtgtcagcgttggggacaaagtcgagacgccatgctgttcgccatcgtcctcgtcctcgtccccatcgtcaccgctctcgtcagacgactcgccctcgtccgaccgatccgagtctgcaagctccggcatacccgtcgacaagccctccgccgtcgacgcgccgtcgtcagccagcgccagactggcaacgcccgccccgaggtcctcggcaaaaccggccgagaacattgttccgtagtactcggcccgggcggcgaggagcatcctgtttgcccagatggtccggccggtgccggcagacggtgcgcgacgcggggcgatgatgaattcgacctgcgagagggtcgaagcaagaggcgccggtcagcaaagcatgagcgcagtgacagtcgagagactcgagtggacgcacatcgctgtagctctcctgatcgagcaggcaaccgatcgtgttaacgaggtcggtcgggaggagcgtcctcgggaccggatccggcagccgcggcggctcaggctggctcgtcacctcgcacgtaatcgtgaacgcgtcgagcctccgtacagcgtcgatgagcgtgtcgcgccgctggaacgactgccagccccagttgccgcactctgttcggaactcgtggcccttgtcctcctttgcggcaataagcttgtcaccggccgtgatactgaacttgaagcggtagacgcccttgcgctcaaaggcgggagctgctgccggcgaaccggccgagggcgcagaggaagctggcagcgagaggaactcttctggcaggggctcgcacgagaggtagagcgacgtccactcggagcccgccggcccgccagcctaaggggtgccaacgtcggtcgaggtcagtcgaggacgggagaagcgttcgagggatcggcgaacgacgcacgtttgggtaccaaaggatctgccagcgcccgccgccgaagagtgcgctcttgacgacgcggctctttgtctgcgaagtcggagggagaggagctggccgtcagctcacccccttaggcaagccgttgccgagagctgccctgagcgactggccgccaatgacaagcctcgatcgagagctccacagactgacctcgcctcgtgtctggtcaaagatgcctttcagacccgtaatccgccattcgagagtgacgccttccgtctggacgtaagcgtgcgtcggctggggaatctgcggccaggacccggccgtcggcgaggcgccggctgctaaaggtgacgtcacgccgacctggctgtggctgaggccgggctggaggtgctgttgattcatctgtgagatggcgtaagtgaaggacagagtcggagggcgaaacgaaggatgtggtgggaggcgagatcgtgagggagccggctgggttgaagtcgacgcgacgccgtcgtcgcagccgtgctggccagccctcctttgctgccatcgccgcgctctcgaggcttttaacgggcaaatcttgtaccaatcacctctcccagccacatccgccctcttctgctagtcgtccgtccatggtggagacagggcagagccaggcatctccctgcgtcggctcggcttcaggtgctgcgcgtccgccgcacgagagggcgcggcggcagcgccgagcctctgtcctccctccctccctttgctctcgacgtccagcccatcccatccttgccttcgctcatccaagcgcaagttctctctcgcccaccctcttccgccatgcgcttcggactctttgccctctttgcgctcggctcggcgctcggcgtcgtcgcccaggacgtcatcaacttcgtcgagccccagggcggcttcggcggctcggtgtgttcctcttctgctacactcggaggcacaagtgggaagggagcctcatgatccgagctttggttcgcgtgcccttggtccaaagcggacgctcgtcgggcgacgaaggggttcgacgtctggctgtggccctctcgcgtctcggcgctgaccctccttttgatctcgcccggccggttcaggtcggctcgacctgcaacgtccaatggtcgcgcgacacgaccggcaactggaacagtgtgtcatcccgagctctcctacgagagaagcgagccaagtgctgaccttgaactcttcctcgtcctgctggccagacgttcaaatcgatcgtccgtgacagactgcccgctcgcacctgcttgagagctgcaactgatcttggctacttactggcgtcgacaacagtgatgaccggacccgaccatctgcggcggtccatcgcccgtaagtcttgcctctcgcaacgacgcgtctcgcggccgcctcaccctccgcggccttccccccccctccttcctgctcactcgcgcagcaagccgccgaccctagcagcggctgacgactcccttcctctctctctcttcctctcaacaggcgtcggtagcaacattgatgcgacgagagacgactcgctcagctacacgtgccccgacgttgacaccagcggcgaaatctactttctgcgcatgacccggctcgacacgtatgacggcgaggtttcgcggcgccactcggcacgcttctgcgtgcgtcggcgcctccgagcatgggctcagatctctgcggtatctagggatcagtggtgggctgacaactctccacccctcgaccgcacgcagatcaatcagagcggaggctcgtgcgcccagccagcgcagggctggggccgaggctacatccgcggcacgccgtgcgtccggtaccaagaaggactttccccgtcgctcgtcgctgaccttgccgccctctttcgctgcagaatgtcgctctatcaccagtcgacaaactcgatctgggacaactaggaggcggatcgcaggcgacctcgctctgctcttcgtccctctcgctcgcctctccttgctccctcttttagtctcttctccctggacactctctcgtgccttttacgctgtcgaccgaagccctcctggactatgcttgctttccagatcgctgcctcgccgactggccctttcactcgcttatggcgaaatttagcatcgaagcatgggccatgcgatctaggtcgagcgcagcggaagtgcgatcaagacatccagcgggacgaacaggcgtcgtttgcttgcccttcgacgccgaacgagactctctgcggtatgcgatggtcaccttgcggagtgcgaggtgcggcgggcggcgtgaccaaacctcagcagcgaacccccccttccaacaatcagcccctgacgggccttgggcgggggttcggccagtaccccttgccggaggacgacttggtcggcagccactgagcttggaccttgtctttcgtcagaccacgtgcgttcgcaccctgcctcctccttttccgcgaacgcaaggccaaaagataatttcacaggccatcaaaaaagtcgaggtcggccgccgagagggctcctccactccctcctgccgaagccgctgctggaccgctcgcggctcgcggtgcactactcgcgacagtggcgacggcggcggccgcctgagttggcctcgtgaagagcggtgctccagccggtgtcgaagcttgaggcaactggaaggccgccgatgtcggctccgacagcggctcgtcgtcaagaaacgactgggccggcttcagccctccggtcgtttgagggggcggtgccagcggcgccgggagcggagtgccaggcccagcagcggcggcggcggtggtcgacgaggtcgtccagccgcgctgagtcgactgcgatgcggttcgggcatgcgagacgaggctggccatgtttgagatggaccctgcgctcgcgccgagtagaggcttgtggcgcgagccttcgagcgctgcggtcgatgacggccgcaatgggccggcgagtgtcgtcgtcgtcatcgatgggtaggtgggatggctcggtccgacggccccgtcagttggccagcgagccgccgaaccgccttgtgcgtgccgcgggctcttgatcagaggttccggtgcggtcggggacgtgaaggttccgagcgcagggcttggctgcatccgcgcgggcgactcgaaggctgccaggccagcaggggcaggcgccgccgactcgaagtcggcaaagtcgtcaaagctgctgctagtgataaagccggcgccgttaccgccctgcgtggccgacgagaaggccgtcgagggcgcttcgccaaagtcgccaaagtcgtcgttctcgttgacgttatcgctggcggtctgcagaggcagcttggccggtgcagggacgagaggagacaagctggccgttgttctcgaggcggacggcggggcgacggcataggccggcgaggccgaccgagatggagccagtggcggggcgagggtcgggaccgacgtagaggcgacgtggatcgacggctttgcggcgtttgctgtgctgccaccaacaggactggccatgaagtggtcccactcgtcggcagccgcagtcgacgaggagggtagcgccgcagattcagaggtgccggccgacatcggaggagtcggcgtcgggccgtcgaacgataggaaggaaaggtcatcaagggccgcaggtgccggaggtcgtcgcgagccgccagcgaacgaggcggccgagctcggcctcgaaggggcccggcctggcggcggtgccagcggctttggcagggcggcgctcggctttgagctgaggaagtcgtcgagtgctgcttgcttgccgcgagcgacgacggggacgccaaaacccgagagaaagtcaccctggttagccgagagcccgtcgtcctctgctccgcctgcgtcggcgccgtggacctcggcgagaaagtcaaagtcaccggccgagagctcgagtgagctgccggccgcctgcgtcggggtggcggcggcagctgctgcggtcgccttgcgcgagaaccggccgagaaagcgcgatacagctgatggcgcaggggcggccgaggcggctgcggtatcagccggttcggccgcttcagcagcgatcggtactggcgactctaagccgagcgagagcgagggacttgggggcgcctgagcggatgtcggggcggtctgctgagccggaagggcgggcgagcttgcacggtcaatcgacggccgcgaagaggatgcgacggtcgacgagggccgtgagggggggacgacagtcgggggtagcttctccgccataccagtcggcttcgagccgccgacatcgacagatccagcgcgggccgagacgggctgagcgctcgtccgtcgactccaagcaccaaaccagccgcgcttctcctcgccgccttccgaagcgtcgatccgctcctcctcctcgccgagccgcgaacggtcccaccactcgtctgcgagctgggggcttgccgacgtcgaagactttgccgtctgcaggaggggtcgcgtccggccattgttgaggagcgaggatgagttggacagcctaagcgagagccgaagcgcagcgataaactgggcgtgggtcgcagatgaagggtaggcgagcgtcgtgctctcgggctgtgcgagcatccgtggcagtagttcggctctaagcgatgaaggtgacgcccaaatcagcgtcgaccggaggtctgccaaactgcgttgacgactggagcgaggacgcacatgctgcgaaggtcctctaaacgcaagttgaggtgctcgtcgacctcagtcgtgacgggctcctctactgccggcgcctcgtccagaggcttgccgtcctcggtctcgtcggcatcggcgtcgttaggagcacgggtattattgcgaaccttgggtaaggatgggtccgggtatcgcgctacggccagctcggaccactggcccgtcagccgttcgaccacctcgcgcggctgcatcacatcccacagagaccccgtcagctcgactgctcgttaatgagtcgcgcaaggtagaaggtagactcaccgctcgctgagcgcgaattgctgcgcgccgcctcgccgttgcccactcgtcttcgacgatttcggccggctgggcagcttcgctccgcttctcggcagaaggctcgaccgaccacgggacgtcgctctcgccggcgtcagctgggaggacggccgatgatccccaggcgtcggcgtcgtcgtcgtcgtccggtccagtagggccgtcaaaagctctagctgtcccccagggatcgtcgtcgccgtcggcggcgagcgccgccgaagcgatcgccggcggagatgagaagggcgcaaagtcgtcaaatgagtctgatgtcgcgaatgcgctgtcaggctcggcagaggggaaggctagtgatgttggtcttgagaagtctggcgattcgggaggtggcggcaaggatgcgaaaggtgaggcctcctccgctggggggctcgctgtggctggcgtgagcggtacaggcgagacgaccgaggtcgaggtaatctcgccgccgaagccgtcgtcgtcgtcgtcgaccggatgttctggcggcggaggactggcgaccggggacagctcgagggcgagctcagcctccgtccggcgtgcctcgtcgccgtctaccgacgagctcgctcgagctgaggaagacgaagcgtcgctccagccgccagagacggcgtcctcggcccctccccaaccgccgtcgttcaagctcgctccccagccgccgccgtcgtcttcgccggcgttgtcggcgagtccgccgctctggccaaagccttcggaggaggcgagcccgtccggagatggcaggcgagcgagcgtcggcaggggcgacgacgacgaggtacctcctgctcgtgggccagccgctgtcgacgtcgtcggtgagtcgtctacggcccaaggcgagccccaagggttgtccatgacagtgggacggggctttgtcagaggagcagcgttgaaggaggcagaataggtcgaggagatcgtggacgttggccggtcgagcagggtcgcgccaggcgcgtttcgccgagcccgaccgacgcatgcgacggtcagccgacccgaatgagtctgacggcactttcacttggggacatcacaaacagcgctcgccttacgaagagttcagaagcggacagccgaggccgtgtctgcgagccaaagaaagtggggcgcatcgcatcctcctcggagcaagccccgtcctcacggccgcatcggcctaagccacttctctgccgcctcaaactgggcaagcacatggctctggacctcaatcgcgtttgggttcttacggccctggttagcggcgagcgatcgaatggcgacgaggacctggtgggcaagatgggcgagtaaaggaagcaaggtcagcgagcgtcggccagatagggcagtgcgcgaggggaagactgacggcgtcccaaaagcggaagccacgctcgacttcggcacggggattcttgacggcggtaaaggtatcttcgacgctctcgagcgcagcgtcctttgcgtctttggcgtcctcgctctcgcgctcggcctcggtgatcggcaaaccctcgttgtacgcaatcgtcgcgtcaaggtacgtctttgcgaggacgccaaagcccgtgtttgtgtcggcctggaacgggagcgagagggaaatgtcgagaaagtcgtcgcggacgcgccgggcgtcattccggaggagcatgtggagcgaagcggcctcaagcaggtgccggagcgagcgggagagcgatttcaggaagccgttgaagacgaggagctcgcgcgagagcgggccggcccaggcttggcttttggcctggagcggtacgattgagaggacgcgcatgatgaggagcatcgacgtcttctcggcctcggtcccgaagtgggggccgccggaccaggccttgccagaccagaggtcgccgtgaaggacgcccgcccgcgtcagctcgagcgcgaggaataagggctcctggaacttgtcgttgacccggctcgcacggatgccggcgtggagcgcctgagcgagcggcgcgtggaggtggttgggttggaggaagctggcgagagaacggcgcgcgtcgtcagcgatttgcaaggcagtcgctaagcagcccgcgcaaaagacggaccctcgcaggtcgaggaagcgccaaatgacgtttgcgacgatctcgtccttcttgtcgagcggcttctcgtcggccactgacggcggcttggccttgcgcgtccgggccgcgaggtgctcctcggacgtcgcgcccaaacagagggcaaagtcgatcgtcgaggactgcagacaggtccaccaaggggaggtcaatcaggaacgagaggcacggtggagcgtgaaggggcaggggggggggcgcacattttgtcgccggagctcctcctcaacgacctgacacggcacgtgccactcaaggcagcggccaatgagcgagagggtctgcttgtcgccgtgtgggacggctcggccgaggttgggcggcccgcgcccgttgggcggataggcgtcaaaataatagaaggccgcctgcgggcgagaacgcggggtgagggacgtcagggccagtcgcgcgcgcttcagaggcgccaaaagagggatacgcaatccagacgcaccactttcttctttggccagtgcgttgggatgaggacgctcgagatgagggcgagggccgtgcagcgcggactcgtgtggccctcggtgacgacctcctggacaaagcgcctgtactcgttgctatcgccgttatcgagcggcggtccctcggtcagaatcccggtcgtcagccagccgacgagctggggcgagacgagaccccggcagatgtggaagtaaacttcgtccgggagtcggtgcgagaaaagctcgtggacgtcttgcgggacgtcggctgccgtcatcgagttttcgtgcgcgagcgcgagcggcaagggcgtcgttcgtccctcttcggccgtcaagacgagcgcgtagcggacggccgaacgggcgcggatgaagaggtctgggaaggcgaggtccttgacggccgggtcgtgcatcgccgaccggacgagctcggtcccgctctttgcggccttgatcgcatctgcgatcggccggaggcccgggccggcgccgaggaagggcgggaaggctggcgtgagctcgcagccggcgaggagcccgaggtcgagaaactggtcgtcgcttaggtggccgagcgacgcgagcagctgcggcttggcgacaaacgtcatggacgcgttggcgaggtcgagcgagaggatgagcttgtcgatgccgttcgtgtagagcaggggctcgtgcgggccgtagatcgagtgaatgtatcctttcgggtgcttcagcaggtagacgagctgcggagccagggttgcgggggcagatggtcagccgagcgcgccgatggatcaaaggggtctctgacagtaagacgagacggacctgggcggccgaggtgtaaggcgcaatgaggaactcgacctgccgatggcggaagatgcggaggacgacgcgcataaggtcgcgctggtgaacgggcgttgtcccttcgagcagtcggacagcctcgtcaaccctgcctgcctcgtaatgctcccaggcctccctcctgagcgcgctatcccgcggcgtgtcgaccgcgccgcgcgtcggtggccggcttgcgagcggcaggcccgggtagacaaagacgggcttaatgcggagcgcctcgagcgtccgaaggtcgctctcaacgagcgcggtcagcgcaagcggaagcccgcccgtcgtcgcgacgagaggctcgcgggtcgagggcgagcgaaggagcgacgagaggtagtggccgaggtcgatgccgagccgcgtgtccgagagagccgagagggcgcacgtctggacgagcttgtggtccgccaagtgggctgcgatcgagcggaaggggaaggggagcgtcggattgagttcagcgtttgcggtcgccgtctgctggcgcagcagcggtcgttcgggcagactgaccttcgaggttgcggatcatgccgggtcgagaagtgaggaccggcgagcgagggatgagtgagaggagggcggggagatggcggcgaggggaggcggcgtcgtgccgagtcggccctgtaagcccgtgtaacacctgagcgtaacagtcctggcgttacgcacgctcttctctccctccgactttttcgtcgtcggccgctccctcgaaccgtcatcttgtcctttccctgctcggctgacttttccaactggtcagtcccccttctctcccgcttcttcctcctgccttcgtctcggcgcgatgagcgatttacacaacctggccaacgaccccctcccctcctcccgcatgcggagagggggccgtcgacggctcgcgttctggcctttcctagggcgagagcgccttgccccacctgacgtgccaccttctgcaaggctagaggcggctgggaacgaagggtcggcgtgcgagccatacttacacatgatctgaccgatccaccccctttccatctccctcgcttcggccgcccccattcgcctcttctccgacccgaccgtctgtctgccgttcgtctttcgactgacacgacccccctgcttgcttcgccccagacccgtctcttgaccttccctctacccttcatacatccaaccctcaacttcaccaggtcagtcatctctcctcccctctccccccccatccttcaacccgatgccctgaagaaaacgacatctttaccatactcaaatacctgtcgatcgacggccggtgtgacagccggccgaacgtgacgattaccgattcagccttgtctgagcatctttcctcttccgccccttctttttctggtcgccctcgacgctttgagcgacgctgacatctctgcttccttttggtccttactctttaggttcgctcttgtcgctttgcctctcctctgcaccgctctgcaaccgcgtacgtcctttccctcaattccatccctgccctccaccgtccgaaatgaagaaaccatcgatgggcggacatactcttcctctcatccacttcgtcccccacacccggcctgcccgagtgtctcacccaagcagagccaccatcacgtccgcctcgccgccgccagggccgtccgagctctacaccacccaggccaacagttcgacctactcgtccggccaagaccatcagcggaggcccaagcagcgccgcctgtcgaggtccgtcatctcttgaccctttctctgcctccttcctgtgctctttccgcaaaagcgcccgttcgaagctgggatgccgcatgggcccgcctcgaacttgaagcaggttttcttcccctctgctttgaaggcgaagcatccagagcagggtgtttggtcgctctccccctcctcctcgccgcgctcttcgtcgcgcgcggcatgccagacgggacgagtggggccagccaatggagccggcgcagttcgggcctcgctcgcagcaatccgcgtctcgagggaggcctctacaacagagggcaagccttgctcgacaagcaggcgccgtgttgtcgcctctgtgacggaggcgcgtgttggttggccaaggcgagctctgacgaggatggtgaagggggcggcgggggttcctagcaaaagggcaaggtcgccctgtccacctcaagggctcgccaagcaggcgcatcttccctcttctgctggtcaacggcctcttttgctcgccattgtcgaaggacacggctggccggggggggggggcggaggcgagcttcttggctcgggcggcgcgttggaggggcgctccccctggctcttcattcattgagcccctcgggcgatgagcgagcgtgccagacccgtctacacactcctgcccaagctctctcgagacgctctcggcagcagcccactggtggtctctgttggtgctcgaggaccgcgtcctgaccctcccttgacgtcctcgtcctccctcagagccgcctccaacagctcgccgccctcgtcgccgatcaaggcttcggctcacattcacaactccttttcgccctcgcactaccaccgcaacatggctgccggcccggctggctcgtcctcagcctcctcctccacagccgcaaccagcggcgccggcccgtcgtcgagcggcagcgctggcccttcgcagcagcagcaggcaagcgcaaaggccctgccgatcatgcacaagacgacggcgagtggccacaacctctcggttaagattcccgacgggccgagctcgagcggcgcgagcagccagcagccggaacatccgatgctctggggcatgcagctccgctatgtctcgtgcgtccgacctgcacgactccgcgatagatcccagtgcgcgcaactgaacaaagctgacctctgccgtgcggccttctttccgggtaggctcgtgacgttggctctgcgtgcgttcccttccatgctagacgagtgttcgtgaactggctcgtcctgaccctctccttccttggttttcatcctcccagaaaacgcctcgctcaccatcatcatgcactactcgcgcatctcggccgcgccgacggcccagtactcggccgcgacggccgttctgatgaacgagctcatgaagggctcgatctcgctcgtcattgcgctcaagcggatcgacggcgagatgacgatcgccgaggcgggcggcagcggcgtccgccggggctcgttctcagccctctcgccggcgagcatgtacgcatcggagaaggagcagctcgtcgtcggctcgcccgacagccggcagccgcccaacaagtcgttcttcccctcgctcgcctcgatcaagaatggcggcgccaacggcggcagctcgtcgtcggccggcacagctgcgccggcggcgctcctctcgcgcgactggaacgcccgcctcggccggctccggtccgagctcttttcgcccgactgctggaagctctcgatcccggccatcctctacgtcatccagaacaacctccagtacgttgcggcgtccaacctcgacgtcgcgacgttccaggtgacgtaccagatgaaaattttgacgacggccggcttctcggtcgtcatgctcggcaagcgcctgacgccctacaagtggtttgcgctcggctgcctcgccctcggcgtcggcatcgtccagatccagggctcggccgccgcctcgggcggccacgccggccacagctcgggcgagatgagcgccttcaagggctttgtcgccgttaccgccgcctgcttcacctcgggcctcgccggcgtctactttgaaaaggtcctgaagggcagccaggccgacctctggatccgcaacgtccagctctcgctcttttcgctcatcccggccatcctccccgtcctttttgcgccggcgacggcctcgacgacgcacggctcgggcccgcttgccttcctgtcggcgccgtttgcccacttcaacttttgggcctgggcaaccgtctcaatccaggtctttggcggcctcgtcaccgcgctcgtcatcaagtactcggacaacatcctcaagggctttgcaacctcgctctcgatcgtcatctcgttcctcgtcagcgtcagcttctttggctactcgatcacgcccgctttcgtcctcgggagctcgaccgtccttggcgcgacgtggatgtacaaccagcccgagacgccgacgggcgtgaagggcaggctccggctcgacggccgcgagagccgcgcgccgggcagtccggtcccggctaacgcgccgattatcggcgacttccggtgcgtcccttgctcccacctgcagcactctcggacccccgcactgaccgctcagtctctgcgcacaccaggaaaccggcccaggggtcgtcagtgaccaacctgatgagtctgctcgcttcgtcgctcacgccaaacgcctcggctaccaacacaccccggcactcgggcgccaacacgcccaacccagaggcgtttgccgccagccgctacagctcgcggctcgggagcgcggccgactcgaccagcggcgggaacggcacgccggctccaggctacttcacgccggccgagggcgcatcgctcccatcgacgccgcaccacctcggtgccgcttgggaggcgtcggccggcagcaagcaggcttggtcatagtccttcaagcaggcttggtcatagtccttccggccggccgaagccctgtacaaaccttttccgcctacccccgagccttccacaaacggccttccctcgactcgcacacggttgggccggggtatcagcggagggcgctcagcgaagaggcgctcgcccccttctctccggctattcccgtcgaccgcagcttccctccaccgtaccgctacacctctctcagtcctaatacgcacccctttgctcccctgccgtccatttgctttgcacgccaatccacattcctcccccttcctccgtcgctcgccctcgcattgtcccccctccccagcccgccctgtcctgtacacacatgtccgtaggtcgtcatcgtcgtcggtcggtcgtcaaaggtcggagggcgtcaaaaaagacaataggaggagggggggagaacgcctgtgtcagaagccgccaatgcgcttcttcttggccttctttgcgccgccggcgccgcctgctcccggccggccgccatgcgcgccgggcataatctgcgtctgcgggccgaagtcgttatactcctgggacgagaaggtcggccgagcctgcgacgactcggtcgccctcgcaaacgacggcagcgagtcgtgcgtccgcagcgggggaagggaaccccctccgccaccgctgccgccgttgctatcctcaccggctcctgcgccgaacagccggaaggaagatagcgccgagggctgcgtcatctgcagcgccggtgcttgcagacgtcggccggtttggctaaacgtcggtaagggcggcgccgcgggcgtaatcgagatcgttggaggctgcgactgcgactgtgaggcgttgttgggcgccgcccctcggccggccgtaaaggccgatgcggccgccgcggatgaaatctcgagccggggcgcccgctgatggtcagcgccgtggaggtcgacgtgtcggtgctcgcccgggtcctcgccgacaagccaggtcgacatgaggctgcgtgcggtcgcgctgccggtgacagcgccgtcaccgacgtcgtcgctcgcccggcccttgcccttccggtcggagccgcgcaggacgggccggaagaagctaaaatgatgcggcgggagagcggccttcttgccgccgtcgtcgccgtacaggctaagcgcctgcgtcgcccgctcgagctcgtcgtccgggtcaagttccgggggtgggacaggccgctgcgacgtgtagacgttcgacgctaagacgagatcgagtgcgagcaggtggcacgcgtgccgcgccgttttgcgctggtcgggcgacgtctcgttgccagccttgaactgcgagggcatgccaaacgtcgcccagagctccctcggcagacgcgaggtgtcagacggcagtggcccaacgagagcctcgatgcgtgaagcgactgaatgcgctgaggctgagccctggccaattggcgccttgccgagcaggtcaaagacagccttgccctgcgtcggcagcggatgaatgccggagtccgaaaggaagagtgacctccgtctcggcgagctcgatgcggcattggcgtagtgtgcaagatcgtgcctgacgccagaaccaaggagcattagttgaccgaaggcgcccgcgagaagagcttgcatagaactcacccagtcagcatcaagggtcgccggctgtctggctctcgaaggtagtcgacggtggccagatagcggtcaaagagcggcttgtcgctcgtgctcgacaggccctcgaacgcagtcgcctctgcaaggcggacgaaacgggcgcatcgaggtgtcagtcgcaaggcgatgatgcaagaccttcgcggctagaaaggcgacgcacctcggtagacgccgtgcattcgctcgagccgaccgtcggtcttctccttgtcggtgacgtcctcggccgcctcgccgccgtcagccaggcgcttgacctctggcgtccagttgttaaggatgctcggcgtcgcgacaaacgggtcgaccacctcaatttcggcctcagtgcccattcggagccggcgcgcaacgacggcgccgcgggtcgagagctcgaaaaagaggacgtcgttgtagtcggtcggtaggctcggatggcggaagaagctgctgccgtgccgcgtgtcgaagatcggccgcgagaggggcacctcctgggcggtcgctgctgtgcgggagcgcgtgctcggctcttttggcagatcggcatgcgttggcggtgtaatcaggtagggcgcgtggagcgactcgaccgagttggcagcggtcgtgtaagctgtcacgatattatcgcggcgcgatgtaaggagaacggtggagactgcgaaagaaaaagtcagattggcgtcagcaaaagcgcgagagaaattgagcgactgcggcaagagggcgacgaacggtcctcgtcgtcgagcgaaacgagctcgagcgagcggtcaaacgcccggtgatgatcccagctgacgacggccttgcccggcatccgcttgtcgagccacgaaaccgactcggtcgtcgagacgcagaggaggttggacgcgaagcgggcttcggacgacttgcgctcgagcgacgtcaagaacgaggttgagccgctgaggtcaaagaggaggaggctgtcgatgggggactgttgaggaaggtcgtggttcagcgagcgttacgagggagtcaaggggcgcgagtcggacgcacgcggaggtcgagcaggcgagccgtctggtccgtgaggacgttcgcctcaaacgtcgtcgagccatagtcgatccgatgaaaggcccgtgagaggccgcccggaagcgagaccgtgatctcgccttttcctcgcgggtagacgacgcccgaccgattatgcatgccaaattcccagatggtcccatcgtcgctgactccgacgccgcgcgtccgctcccatggactcatcgcaatgtccatgtgctgaccgccgcccgtcgtctcgcgcgaaatggcgaggatctccgtcggcaggacaggctcgtcattctcgtgcgccgtcgtccggagcgagaggtcaacaaggtggacgtgcgacgtcgtccggacagccagatgggattctgcgcgcgaggcacgcgtcagccgtcggagcagaggctctcaagcgagccggtggctgagaacagactcacttcgagagcggccgtggctaatggtctggtagggcgaggagacgatctgccggatcggcgtgaggaacgtcgcaaccggccggactgcgggcgtaaagcgctccttgggcgggatccggcgcgagagcttgacggtcagggtcgagatgtctggcagcacgaggcggtcagtggtgcgacctgttgaggggcggctggcacctgtggacgtactgagctcctcgccgagctggccggtcgggaaggcgacgaggccgacggcggcctggttcgggaagaagatgttctgggccgaggtcgtcgcaatccggttcccctcataagggtcccacgccggaccgactgtcgcttgctcctgggcggccttgtgcgctgcgacgatcggatcgtgcaggagctcgtacgggacgtgcgcaacctcgggcagcgtcgtcaggaagcgtttctgaacgggtcgatcggcggacgtcagctgacgtgcagcagtctgcagaaactcgacgcacgctggcctcggcgacgtgctcgggtgtttcgttgcttggggcgtgtggtcgtcgtcgcgtcgaggggaacacgaggacaggcgcaacgacctcgtcgagcttgacggctgggaaggggggcgtgctttagctgtcagcgacgccttgcgacggcctatccagtaagcgggatgctcaccgtccgttccccggcggcccatcgcccggagctcgagcctgcgccgctcgccatacgcgagctcccggtcgacgtcgcgcgggttgtcgaacgtgacggcgccgaccgagccgtgtgcgaggcggaccgggcccggcgcctggtggtcggcctcggccggcggcggcgggcgcgtcttgggcttccgggccggagggaggggcgcaagcgtcggcggatacgggaggggggccatccacgcagctgccttgtcgaggggacgtcggacgaggacgaggctggcagggaggtcgaggttggctgccggtaaccctaagccgaaacccctttcggtcgctccgtcgtcagccgccccccgcccgtcttgcccggtcacggccatctcctcctcatactcgaatcacacctcaaccgccaaatgctggcccttgcctctactcgattcgctccagccgcgctcagccgcgtcatggcccggtcgacttcgcccgtcgccgtcgccctccgccttctgtcggtcagctcgccggctcgctcggcgaggccaaagacgcccctccagagtacgtcctgcccgtccggccgtcttcacgtgcgagctgatccccgaggctgctcgcagatataccgtgcgagaacgacgtcctgctcgacccgacctcgcacgccgtcatctccgcccacctcgccgagccggcagacctgcacccatccgtccatctgccgtccgccagctcgacaagccctttgcacatcaccgcggcccaggaggcgcggcgcaaggccctgccggcgagcacaaagaagctcaacctgttgcttggctcacggaagccgtttgagctcgacgaggctgaccttgacgagacgtttgtccggggtgcgccgcgccgcgctgcagaggaacgagggcgcagtctcactctcgcgcgacacgccggctgacgacccccttctttccccttcgtcggccaggctccggcgctggcggccaagtcatcaacaagtcgtccaactcagtctcgctcatccacaggccgacggggatccgcgtccagtgtcaagagacgcgctcgcaggagcagaaccgcaagattgcgcgaaagttgctcgctgagaaggtgcgcgcgccgcggcgcctggctgtcgctcgtcattcgttcgcctgccgctgccgtgctgacgcgtacattcctagctcgccacgctcgacgctgaatcaaagcagccctcgcggaccgagatcctccacgccaaagcggccctcaagaagcgccggcagctcaagcggacgcagcgcaagtacaagaagggcgagcttgatcggctcgccgacaataccgacgtcacgctcgaggagggcttgctcagcgctccgtccgagggagcgttcgacgaaggggctgacgaggtcgagcagagtgaggcgtttgcctcgcctgccaccgctcgcacggccgaccagctctcctcgcggccctaggcccccatcttgctttctttgctctttttctctgttgcttgtacccgcgctcatgccatatgtattctgtctgaacgagggtgttgcaccacggaggggcaagaattgcaggcgatgactgccggtcacagcgacggcggccccttagacaaagcaaaggctcttcagaggcaggtcgtcggacgctctgccggtccagactgcagaatcgcacgtcgactggtcgtgacatgctcaaatctcatcggtacgagtactggtaagggttctgcgcgggcgggggcggcggcgcgccatatgggctgctcgcaggcggtggctgttggccataagatttcgacgagacggctccgtacgggccagtcgggggcggtggtggtgccgggtacgttgctgagccgtaggcgatcggacctgtggcttgccgctgagactgctggccgtactgctgctgaggtggtgggggaggaagtgagccgtacgggttgtgatgagactgttgccgatggtatgactgctgctgaggcggcggaggcggcggggcgccataaggggaggaggcgctcggaggtggcgggtaggcagagtagggcgaagacagaggcggagggtacgagccctggcgctgctgctgctgctgctgctgcggtggcggcggtggcggcgcctgttgcgaataatgcgaagaggtaccgtatggcgaggcgctcgcatacggcgacggggccggaggtggcgggccaggggaggaggcgcttcctccaaacgtcgagggcagcgactggccaagcgcgccaaagtcgtacgggttactcgccggcggaggcggaggcgacgagtagccaccggtcgacgaggacccggccggctgcgacgacgacgagccgtacgggttggccgctgcgtaggggttgctgaaggccgtcgccgtcggtgacgaggctgagcggtcgacgttcgcgacgagccgcttgcgctcgtcctcgcggctcgagaggaaggtccggaccgaccttcggaggccgtcggtcatcgattggagctgggcgtagaattcgagcccgcgtctggtgaggatggacgactgttcagtctgcgcacacaaggggcacacgagcagcaaacgtacttgagcgcccggcggacctcgcggtagtctgcgatgtcgctctcgagttttgccgtcagctcgccgacgaccctctctgctttcttccagcccttcatcatgcgcgccgcgcccgccagccggctgagccggtccatcctctcgccgagctcctcgaccgtcgtccgctggtgctcgaccgtcgccgccgcccgggcctggaacggcttgaacttttctagctcggcagcaaagacggaggactcgccattgggcccggcccggcggttgaggaggagctgctgtgagacgtcgtcgttttggatctgtgtcgggaggggcggtcagctaggtcggccagtggagtcaagcatgaaggaacgcacgagctccttgagctccttgagcgcgtcggtccgctccttcttgagccgatgcaagcggccgagccgctcctcgacctcgccgacgagcgtccgcagctcgaccttctcgcgctcctcggcctcctcctgccggacatcgaggtcaagcagactcggtgccgactcgcctccggcggccgcccggtcaaccgtcgagctaaacagctggccgacgcccgacggcgcctgaagctgggcgatcgagccccgaatcgcgccgtagagcgcggcgatgcgctcgtccgactcggctgcactcgtaaacgccgcctgctgattccggaggtcctcacgaaacgcctttgtgagcgcggccgacggcggctgagtccacttgctcgggccgtgcttcgcgcgaagccgctcgcactcgcgcgattcgccgtcgaggtcagccttaaccgcctcgagctcgtgctcgaccgcgcgcctggcccggtcaagccgggcgagaagcgcactcgtctcctcctcgcgctcctggctgttgatctcgcccgcccaaccgagagcctccttgttcgggagcgcgagcgcgtcgagccccccgccgccgcccgtcagtagacccttatagcggttgacagcctcgggcaggccgagtgacgcgagccccgctgcaacctcgccctcggcttcctcgctcttgtcggcctcggcccgggcaagctttgccttctcctcagagtaaaccgacgcctgctcgtggaccgcaagcgggacgagccgcgcgaagatatcgggcccgatcagcttggcgacatcgggcgaggcgtacgtctcctggatcggaaccggctttgctgcgtcaaacttgtcgatcggtggcagggccggctcggacggaagcagggcgtggtagatgaggtcgttctccttctgggcctggagccgccgctcgtcgacgacggccgcgtgcatcttgacgagctcggtgagcgccgtcgctgcgtcggcgggtaatgttggcgaagcgaccggcgtgaacgtcgtagtgaagacggatccgagcttgacagcctccttggcgagcgcgtcggcgacgttgagccggacgagggcgtcgccgtgcttggcctgagcagagtcgtgctgcgagcgatagaagtgggcgattgattggaagtgctttgtcttgacctacaggcggaaggaagtgagggcgttagcatcgacgacgttatgcgcagcttggaggacaagaaacgcacggcgatcagattaacccagttgcggtcgatgatacccttgccaaagaactctttgacgtcctccccgagctgggcgtacatcccgccggccgtcgctgcgagcctcgcgacgagcgccgggttctgatggccgccgttcttgcccttaccgcgaccttcgccctcgaccttctcgacaaacacctcctgggcctgggcggttgttaaaccaacgaggtacttaacgagctccttactgaggtcggtcgacggcgcgtgcaagaaattgtcgttgatgtagacgaacatgccggcggccgaccggaggtggttgtacgcccgcttgaggccgtcgggcgatgagcgtggggaggacgcggcgagagcagagagcgtcgcggcgaggagaaagatgatggaggccttttcgaacgcgagcgaggactgggtcgtcggcttgtgggtaaaggcatcgttcctgggaggcggtggaaggggggggaggggtcagcaaacctcggaggcgcgagacgagagaggtggcggtgagaagcaaggggatgcctcaccagttgaaagcgaccttgagctccggaaacctcagctcgagcagctcgagctggccaaagtagcggtacagcaggtcgcgctgggtcgcctcgctccccgcgcccttgacggcgtcctgcctcgcccgctgaagcgcggccatctcacccgcgtacgcggccgggtcgtcggcgtaggcgcttgagatggtttgccggagcgggccgacatagtcggcctcggtcgtcgtcttgagagggatcgcaatcaggggagactgcattctgggctgagattggagggtcgtggtcgaagtgacagagcaccaggagcgccatctcgcctcgacgtcttgcgctcagcccccaccccggggcctggtgacccagacccacagggtggaccgcccagcgtgcactgtaccaaggttcccatgaggcgttgtaaacgattggccggaaccatagtctggttctggcccacgcttacgacgctgctcaggtacccttcggcggcagtgcaaaccgggcagcccaccccggggcctggggcaggttgggggtggcggtgtgcgtaatccagaggctgacattgtaggtccggggctgtgggtccattcctatgcttgcttagcggctcctgccgggcgggccaagggcggggaggcgactccccactcggcccgaatgccacggcaggaggccacactactaacgtttcccgcaccacctgagagagcatgtagacttaacatacatagaacagtccagagtgatggggtaccgcggtcgggcatagtgtgccttggaaaaagatatccgtatgttgtagcacacggacggcgatttgaaattgttggtttgcagggatgtcacccaccgcccccagaaatctggagcggtgggaaaggaggatgttagtgtatcaggtgcaccctcctaatcctgcggagtttttaaccagacagcgcttcttctgcctggtctccagctcacctcgaaacactgggagctactccagtgcaactttctccatcgaatcactttacccagtccccgaaggggtggacattatgactaactcaacagagaagttctactacccaaccttaggctttcaggcgagtcctcgaaaggagcggctagattactttcaggcgtacaatggagtagttcgacaacttcgggtgaaagcgcatatctacgggacgccagatctctttgtggtcttcccctttgggcgaccctcctccatacatctggactgagaccacctaaaggataggacttaaagagattgaacgttgcgatactgctttcctcggaacctgagctaagaataccctattctccacacttcttccgcacgctacccggcttccttacggccggtctttgttttttgatcaccttgagtactctacagagatcatctcaagggaaccagtcttgaccctaaaaaggcgccttaactggcccatggaggcggagatccaggcgcatagtcctttgtccacctctgttccaccaatatgcttgtcactaacgacctatgggcataaggtgcggactgtttaaccctaccctttcgaggctgtgtgacgttgtgccgcgtctagcgctggcagaccctccccttgcttgcaattgctggactattcggtccggtgcaattgctcacatattgcctcagcgtgacatgggcatcctccgggtgtctatagacagaggacttgttcatttaaagaggaaccgatggctgtagccttaacactcttaccacgaatcttgggtaagacccgctttctttcttttatcttggccaaacgtcgacccctttaaagctacacgtaactttaaaggtccctacccagtctgataaccgcccctgtccccacacggaggacgcccgcggccctggtggcgctcagtgttagtctacgtttgttttcagccctcctcttttcagaagagaggcttctacttaagattcccatgggaggtaattcccacgggcgaaagcctgttccccgttttcgctagccaatcttagccccatactccgcaaggggcgcgggcgcgttcaatgacacgcctagctccccatagtgggcggtaactaagactctagccctcttctttggcaggtgtccaattggaggaggcacaaaaacccacatcactacacggcgtcgattcctttccaacatactctgtctctggtgatccagatacctcctggctccagagggaaagggcgatcgcgactacagggtcaaactgtcctttgatccggcagcgtgcatgagcggtggtttgtaacggcgaaccgagggcttaaacaacgtgaactccggaggagctgatctcctctagtctggcccaaactacttagccttagttgggttggccccctcagggagggcatcagcgactgtctgaaatccataggctacacacctccgctggcctagcctgcatccgcatgctgacccaaaaatgcagtgggtcaactcaacgccgtcaacagggagaatcggaggggtaccgggcataggaaagggcccagggacattgcgtctatcacatctggctgcgggctatacagatttttagcccgtcatatccagacggctagaaggccaacgtacgctcaacggttaatctgccgttagttccacgcgtacattgtctcctagtcgttagtccccgcttcaccagcggtcgccgcccttccttgtccgggccggagccgatggaggtaaaaagcagcaggctaacgtaagacagccatgtccgggctagaggaaggccgccctgtgggcgccttcttaaccctttgccccacaggccgagggagttggcccccggcagggggttggtaatgggatttctccctgaggttttgggggtgattaagcaacgacacgggccgggcccgctagtacagcgcagggaatcgaaccccgtcctggaggacatgagcctccggtgctgccagtacactacgctataggtttttggagagggttggctagaggtgggggtgccttccgccaaggggcggccagacatctgggcgcctccaaaaatgcagactttcggtctcctctctacccgtgccacaattctgacagcgcaccttaaggaaaggtaccctggcgacagggagtagctcgagaacctctgcaacggggcggttcgtatccacaggtgaccgtcggtggggcgcccggggccgaggcccctctccacgtcgcacaatggcagcagcgtacctcaacgaggacacccgcctctagctagagggcgtaaacgccgtccgccaggggtccggcaacgagcccgccgacagcggcgagccctaccaggtagactgcgagaaaggtgtgtcggcgccccatgtcggccaggggctggagcacggggctccactccccgtaggctgctcgagtaaagatccagatcgtgtacgcggccccaagcagcacgctagacgcggcaaggaagcttgccacaggagaaacagatgctagcccggcaatgacaaacagctcagagagccagttcagcgagggcggggttgcacagtttgccaggctggccaggaagaaggcaccggcaaaggcaggcatcaggattgcggttccccggtagtaggcggtgacaagggtgtggtaccgctcgtagagcacccctcccacaagaatgaagagggcaggagacacgagcccgtgggcaaactggagcaggatacccccgctccacccgattccggaggagagggcaaggcccataacggagagcgccatgtgcccgacggaggagatggccacgaccgctttaaggtctgtctgccgcattgcgctaaggctgctgtacacgagggagatggcacatagcgtgagaacgagtggcaggagtgccgtccacgcagccgggaaccagcttaggaaggccagggcgattccccatgctgacagcttcaagacgagcccggccagaaggacgctgcccccgaccggggcctgggcgtgtgcccggaagagccaggtgtggaagggcagcagtggagttttcactgcaaaggcaagggcaaacccggaggcaagggcaaggcttgccccggccgagagttcagacgtgagggttcccgtgaggaggggacccggctcgcctcaccagaggaggaccagagaggccagcatcgctaggcttccgagtagagtgtagaggaaaaagagaaaggcggcacgaatacgcgctgccccggagcctcagatcccgatcacgacgaccatgggaacaaggaccgtttcaaaaccgatatagaaagagaagaggtcaccggcgccaaataggtagtagaggcagccggctagggcgagcacaagggcgggatagaatccctccccgcgtcggattccgccccattccgcgagtagggccgcgagcgtcactagcccggtgagaacggcaagcaggatgcctagcccacccattccgtcggaaagggtgtacactaggaggctgcctgccaggagtccaacggcggacacgagggacagggcctgggctgcgtaggctccccgaagggttcctgccagaagcacggctccggcagaaaagaaggaggacaaggagagaatggccataggggcaggataaagggcagacccctcaccggggctcgggccccttactaaacgaggcagagcaggaagaccggcaggagggccacgctggtcaagggaaggaggtgcagccacccaaaggtgaccagctggtcgtatcggagccgagggagggtcccccggattcccacaacaaaggtgacccccgcgagcccggccaggggcaggaaggccccacccgcccagagcaccccggctagcagggagataagcaggagggaggcgtactccccgaggaagtagagcacgaagggaacggagctaaactcggttatgtatccggcaacgagctcgctctccccctcgggcaggtcaaagggggttcggttcagctccgcgagcagggagacaaggaagctaaacacaagaggcaggagaggcagcgcccacaccaccgccccctgggcatcggcaatttccggcaggctgaagcttcccccgagggcaaccactgccagcacggcagacccgaaggacagctcgtagctcactatttgggctgcggcccggatggccccaaccgtcccaaagtagtttgccgagcccatccctccgtacacagtcccatagatcattcctgaaagccaggttatcaggagaaggactccaccggaggagtctaggagggctacaccaaacaacccaggcaggacggtaaagctaaggaccgccatggcaaggaaccagacgggcacgaggtagaggctccatcggctcatcagggagggaacaaggatctctttcaccgcgagtttcagggcatcggcaaacgcctgcaggagtccaaaggctcccaccgtgttgggaccgacccggcgctgaagcgccccgagcagcttccgctcgtaaacggtgacaaaggccaccgcaaggagggtaggggcaaatagaattagggattgaagcatagggagagaaaggtctgcagggcagagggaagggggccggagccctagcacgaggtccgaattgaacggacagccctggtgggggctaccccctagcaaggggcttgacgcaccaatgtcagctcatgccccagaggcagcgggattcgaaccagcgtcgcaaggctttggaggcccgcatcataccacttgaccatacctctcgccgggcccccagccggtggagggagtcgaaccctagggggaggctttgcaagcctctgggcgaccctcgcccaaccgccggcgctagatgcggagggaatcgaacccccgatggcaggcgccgtccgagttacaatcggatgccttaccactaggcaaacacatctagggagccccttgccctcaaggggaattgaacccctctttccctcttgacaagagggcgtcctaaccactagacgatgtgggccggttacgccgagctggagtcgaaccagcgcagtctgcttggaaggcagaagtgctaccgtaacacttccggcgcggtggagcccctagagggattctaaccctctccttcctggtaacagcaggatgtacaagacagtatacggtaggggcctggcactaggcggagagggaatcgaacccccgacctccctacatcaaagggatgtgatcccgtttcaccatctgcctcgggtgcccccggaaggaatcgaacccccgctaccccgacccaaacgaggtgtcataccactagacgacaggagcgctgctcacaagaggactcgaacctctatgccacaatgggcgctgcctcctaagggcagtgtgtctaccaatttcaccacgtgagctagagagggtgggtgccccccttggattggcaggaactcgaatcctgaaggctactatgcaaaagtagaatgataccagtttcatcaccaacccggttggaaccacagggaatcgaaccccagttactcgcgcttcaaacgagcgctttaccactaagctatgtctcctttgggcctcagcacggccgaaaggccacttccgacgggccaccccagcggggtccagagtacaccctaactgaatcgaacagctgctgcccctttacaagaggggtgttctgccattaaactaagggcgcagggtctccactgaggcaggaggggccaggctatcccaggtctacgagtagaggactaggaaagacaccatcagcgcgaacagtccagtggcctcggcaagcgcgaaacctagaacggcgtagctgaagagttgcccggcaacggagggttgtcgagatactccagtgattagagcggcgaagatagaaccgataccgattccagctcctgttagaccgatagcggctaggccggcaccgatcgctttagctgcagcaagcatgggactaaaggggcggaggggcggtaggctggccccaagagggctcaaaaggttagccgcggctggactcgaaccagcatggacagctgtccagcagcgcttgaaacggctatgtctaccagttccatcacgcggccggggcccggttaggacttggtggagtcgaaccaccgccctctgcgtgtaaagcaggtgtgcttccgtaacacttaaatcctggaggtagaggccggcaccggcatgctagtgttgcgtctagggggctacccaccgtggagaggagggctccgaagggctcttgccccgggagcggcgactcctcccgccgaattttaggcctctacgggctcggggtggagttgaaccaccgctagaccagcatgaatggtctgtgctaccataacacttcagagccgggtagacagtaggattcgaacctacggtgggcgttaacccacgcccgttttcaagacgggtgctttcgaccactcagccatgtctacgctgtcttgcggtgagcggatcgaacgcccgtagctgctatcaaaaagcagagtcttaccactagacgaacagcaaggggtatagtcctgcctggaattgaaccaggaccgcgttcgcgaaaagaaggcgtgctaccactacaccacaggaccctagggccggcacagggaatcgaaccccaatacccggggtaaaaacccgatgttctaccgttaaactatgccggccgaacgggcgcccggggcggcccagaggcccgtggggcggcggcggacccaacgcgcccgaccgcccgggttttcaggactctttctacacgtcgctcaatgtcggcagtgcctccctagtaaatggggcccggccgtgggcagttgcccacgggccccttgggccgcggggctagaccccgtttccggcaaactctagccctccggtacggatttcgtagacgaatccgaccccgaacaggctaaaggcagctgccatcccggccgcctccaggaggctccaccccgctcccgccaccgcaaaggggtagaggagcaggatctctaggtcaaacagcataaagaggagaccgacgaggtagaaggcaacgggaaaggcagcgcccgagtccccgacgacagggctgaatccacactcgtaggggagtgctttttccgcatccaccgcagtaggagaaaagagccagttcagcgtgaacaggagaacggctaggccgagggcaggaacaagaatcgtcacggttaggcgagaaggagaaccgcctgggccgcgtggccccagaagacggatagcacaagggcaagggcaaccgccgaggcggagagcacttgaggcacagactggagctgagggcccgcgaggaccgccccctggaggggtgccccggggccgaagcctacccgggtgagcatccagaggtagaaggccatccccatggccgccgagaagacgacaacgggcaggagggccaccgcgcccccggtgtagagcccgacaagggcacctactttggcgtagaacccgacaaaggggggaattcccccaaagctcagcaggaaggcgtagaggggcaggagggcgcgaggcccggccagtccgcgcccggccagcccaaccaggcttcggagcaccggacgcccgagaggcgttccggcgaacccggactgcaggagcaggaggaaggccgcggtggacccggcatactgcactgcgtagaagaggccatccgcagcagacccgcccgcaagggcgaggagcgcataaccggcgtgggctatgctagaaaaggcaagcaccgccataaagccttccccggccagcccgagcaggctcccgacgaggacgctgagggccccggccaccacggcggggccaaaggcgccgcctagcaggccgaccgaccccacggccgccacgagggccaccttggggtaggtcatcacgaccgcccccgtttcgggccggagccctcggtagacgagggcagcccagcccccgagtgggaagcttcctactttaacaaggaaaccgagcgccatcgcgagggcgcccgcctcggctgcacccggggtgtttagagccgtgtagcccccgaggatcagcacactggccagcgagccagcgataaagtagagcacacctccggtacgggaggctcccgctcccgcgcctagggcggtaagggtgtagagggcgtagctctggagctcgacccctaggtagagggcaaagggcgaggccgcgcagagaacaaacagggtcccgaggagggcagcctgctggacgagaagggactcccgaccggtgagggctgagccggcggagaaggcgccgagcaggagggccccgtaggcgggagagacgagcagggcaagtccgtttcccactagagttggcagtcaccgcgatttaagcagtacaagagaaagaaagatgagagcagtcattgggtgggctagcttgcgctgaacccgtacaccaccacgaagaggacaagccagaccacgtcgacaaagtgccagtacacgatcgcaaactggagccctatgtggtgggaggcggtcaggtggtagtagtagagccgagcggctccaaccgcaagaaacagagtcccgagcagcacgtggaacccgtgcgctccggtagaggcatagaacaccgttccatacactccgtcttgcatgctgaacccagcggtctggtactcgatgccttggcagagggtaaacacgacggcaaggagaagcgtcagcgccatcccagctaccgtggctcctcggtcacccgcgaccagcccgtggtgggcgtacgtcaccgccgctccggaggagaggagaaggatcgtgttcaggaggggcagggcgaaggggtcgatggcagcgatcccggcagagggccaggagacaccgacctcgacggcgggagacagcgccgcgtggaagtaggcccagaagatggacacaaacaccatgacctcggtagcgataaacagcaccacaccgaggccgatccctcggacaacgtccgaggtatggtctccgaggtaggttccctcggtgacgacgtcacggagccatagggtaaggataagaaccacgacgcctagggcgaggagaaggatggatcccgagcttgagaggccagagaagtagcccaccgcagctatcgctaggttaaacagggcaacagagatgtagagcggccagggtgagaccgtcactatgtggaaggggtgaaacaggtacacgggagggaaaggataggaaggcgagcagggggctcgaggggagggactcggaatctaaccggggcagaggccgccacaaggcctagtactaacactatacgatccctccaaaataaccgggccaagggaatcgaacccctacatccttggccgaaacaaggcgcactaccattatgccaggcccggtggggtggacggactagacggagattccgccggtctcgtccaggtagctgtaggcaaggacaaggaacacgtaggcttggataaagcttaccgcgatttctagcccgaccagagcaacgaagattccgaagggaagcaggcagacgaggccaacgaggacgctcgagacgagcagcttgccaaggaatcccgaaaggatcgccagcagggtgtgacccgcaagcatgttggcaaagagccgaaccccgagagacagggctcgagcagtgtacgagatcgtttcgatcaggacaagaagaggcacaagggcgagaggtgttcctgcgggcacgaagtgggcaaagaagtggagccctttcgcggacaggccgagcgcggtgcagtagaaccacacggtgaggctcagtcccagcgccacaacgagggacgccgtcgagctgaacccgtatggcacgttggctacaaggttcaggagcaggagaaagagaaaggtggtgtagaagaagggcaggagaggcacaagcgcagttgacttgcctccgtcgctagccagcccgtagaccgagccggacaccgctcgcaaggaggcggtgaatcggtccccggaaagggtagacgatcgcatcgcgaacaggagagcaaacacgagggcggcaagcccggcccagaggccaagcgttgtcaccgcgaactgagacccgaaggcctctagcccgaagaccggtgcgcctcggaactgctccagcggagagagaaggacggcagccgaggagagggccactcgggcggcgtcagttcgggtctctgccggcagggcgtagacgccggcaaagacgagaagcgcgccaaagaggacaaacacagccgataggtcggctaggtagtagaagggaaaggtaatttgaggcatggagggagtgagagggttctacccgcaggaggggtagggtgaaggggtggagtgcgctaggcgctcttcgctagggccacagcgccgcatatcgcaaacaggaggacaagggttgccagcagggtaagcggcaaggcctcgccgaacgcgcttgaggcaacgaggggcagggtagacgaagcgggggccaggtaggcaccctccgcgaggagagcaccgcctgagaagccggcaggtacgcctcgcacgagggcaagaagggccacgagccctcctaccattcaggagacggagaggccacctccggaaaggctcgaacggtctcgagctccggagagcagcacaacaaacaggacaaggatcgcaatcgctccaacgtagaccaccaggtaggcgaacccaagaaagcctgctcccgcaccgagaaggtagagggcggcggagccaaagcagaggacaaggtatacgaccccgctgtagccagaggtcgcggttaccgcgcccagggcaccggcaaggcttgccagggcaagaagaagggtggtcacagaggggtcaaaagggtgtccagtccggaagggtgtgggcaacgtctacgggaggtatccggtgggtgccgacaagacggctccggacacccccaaaaaccaacttttcaaaagtgtctctacaagtcgttcaacgccagctacgccttttcagccagaactcggcccccacgagccgcagaggcccgcctacagggcaaggcctgacgagatggagaaccaccacacgccccgcgtggggtgtacccgacgcccgtgcgagagcatctcgcatgggtgggcaccagatgcgagcatctggtgcacctatacttcgtataggagacatccctagatgtcactccctatactcctggtgtcccctctccatgaccgatcggtcatggagaggggacaccaggagtatagggagtgacatctagggatgtctcctatacgaagtataggtgcaccagatgctcgcatctggtgcccacccatgcgagaggctctcgcacgggcgtcgggtacaccacacgcggggcatttgctccccctcttaggacccctacttcccccacggtaacgtcgatctcgcgacggcgatcgcgtgcgagccgcacccgaccgatgagcgcgccttccggctcgtctcgcaccggaaaaagtattcgtttcaggccgacacggtccagagccgggatgagtgggtcaaggcggtccagaaggccatgtttcgcgtccagcacgagggtgagaatgtcaaggtgtgttgcttgctgtgcgttcatttttttgccgaccgatgagggtggctgatccctccccataccggcctcgccgcagattgccatcccattcgaggcgatcctcgacatcgaaaagtcgccgacgctcgagtttgcagagtcgatcgagatcaaggtgctcgaaggcgacgatggcggcgggctcgccgatgggccgtccgacggccaaggccggcgagcgcacccgcacctccaccggccgcacaaggcgacggccgcggcgttcgactcgtactttttcgcgtgcttccacgacattgagggcgcgctccggaacctccgcgaggtcgtcgacggcttccaccagcccgacctggcgctgacggccgagggcgaggttgtcgtcggcgagggcgtccgtgactcgacgatgagtggcgagcgccgccggcgccggtcgcacgactggctccaggagaaggagcgcaagcgacgcgagggcggcgtcggctcgaccttgaaagcccacctcctccaccctttcgcgagcccaaacgatcacgcagtcccgcccgcgagcgtcaacggcagcagcgagccgcccaaggccatcacgcacacgctctcggctcaggacgctgcggcgtttggcccgcggacgggctccgagctcggcacgcagctctcggccctccggctctcgagcgacaaggacagcgaccggactgtcgttctcccgcccgcggccggaggagagggcatcaacaagtcgcacacgtacccgccgcccgcaggggcgtcttcagctaccgcagcggacgagggtggcccggccggctggctcaaagacaagctgccgtcgctgctgaatccgctccggtcgtcgtcctcgaccaagtcggcctccgcaacgccccgacgcgccggctcgccagtgccgtcgtcgtcgaccggcggcgtcgactatgaccggcccgtctcccgccgaaccgtccgagagacgatcgagcgcaatacggccgctctcacgccgctcgcctcgcgcgacgacgcggcccaggccggccggctcagcacagacagtacggcgacgaccgcgagcgtcggcgcagatagcgagggccggggcgacttttcactcgtcgagcgcagtgcgcgcggcgagcggcacgaccttgccgtcgaggccaagtttcacgaaatcttcgcgatggacaagtcggagcggctgctcgagcgtgcgttgctcatccgtcgcttttgcgcctcctcctctctcgctgacctccccccccctggtcctgcctgcctgtcgtcagacttcaacggctacctcttccgtgtcatccccgtccacggcaaggtctacatctcggagaagcacttctgcttccgctcgtcgcagctcctcaccaagacgcgggtgagtccccgcgctcgtcctttaccctgcttctgctcagcgctaacgctcagagtcccctccgcaatcagatggttatcccgatcgtcgacatcatcgccctccaaccgcaaaaggcgtttcgctttggccaccacggccttgctatcatcatcaagggccacgaggagctgtttatggagttttcgtctgccgagcggcgcgatgcgtgcaagacgctactcgacacccaggccgacgagctcaagcggcacaagcgcgagccaaagccggtcgacccggaccgcaaggaggccaagatcctccaggacctcgacgcgagcgacatgacgggcaccgatgagatgccgcgcgagctcaacaacgtcggccagacaaaggacggcatcctgccgccgcccgtcatgtttacctcgactagctcgtccttcctcgacttcaagcccaaggcgccgatgcatatcacgtgcctgactatcggctcgcgcggcgacgtccagccctgtgcgcctccctccgcaatatacgcttccacatttttgccgctgctgacgacggaagcttcccacccatttgcgacagatattgccctttgcaagggcctccaagctgagggccacaaggtccggatcgcctcgcacggcgagtaccgcgagtggatcgagggcgtgcgttcctgtctcgctcgccttgtctcgtcccccttttaggcgctgacctaccgttgttcctcctcagcacggtatcgagtttggctacgttggcggcgacccggccgagctgatgcgcatctgcgtcgagaacggcatgttcaccgtctcgttcatcaaggagggccttcaaaagtttcgcgactggatcgacgacctgctcgtcacctcatggtcggcctgccaggggaccgacctcatcatcgagagcccgagcgcgatgggcggcctgcacattgcagagggcctcggcgtcccttacttccgtgccttcacgatgccctggacgcgcacgcgggcctacccggtcagccctctctctcgccctttgacctgatcaccagagcactcggctgacacctctgatccttccctgtcaacagcacgccttcgcagtcccggacggccaccggggcggctcgtacaactacatgacctacacgatggtctgtcccctgatgtcctcagcacgggcagatgcgcgcttgctgacagcccttcttgacttgccttgccttgccttacctcagttcgaccaggtcttctggcgggccatctccggccaggtcaaccgctggcgaaagaagacaattggcatcggctcgaccagcctcgatcggatggaacagcacaaggtgcccttcatctacaatttctcgccgacggtcgtcccgccgccgctcgactggtacgagtggatccgcgtcagcggctactggttcctcgacggcgccgacgactcggacagcaagaaatgggagccgcctgaaggcatgctcgactttatcgagcgcgcccacaccgacggcaagaaggtcgtctacattggctttggctcaatcgtcgtctcggacccggacgcgatgaccgactgcgtcgtccagtcggttctcaactcggacgtccgggcgatcctctccaagggctggtcggaccggctgaacgtcaagaagggcgacggcgacgacgacgaggaaggcgagcagcaggacgaccggaccgaggacgagaaggccaaggctgaggaggagaagaaggccaaggaggaggccaagaaggagaaggaggccaagcagttcccgcccgagatctttagcgtctcgtcagtcccgcacgactggctctttagccggatcgacgccgcctgccaccacggcggagccggcacgaccggcgccagtcttcgggctggcattccgaccatcatcaagcccttctgtgcgccgcccttcccccctcttcttgcctgccgctgctcgcagagctgcctagactgaccatcccatctcgtccttccgccgctttgcagtcggcgaccagtacttttgggccgaccgggtcgaagtcctcggcgtcggctcgagcatccgcaagctcaacaaagaccacctgacggccgcgctcaagacggcgacgcaggacatcaagcagattgacaaggccaaactcctcggcgaggaaattcgggccgagaatggcgtcgccaacgccattcaggccatctaccgcgacctcgtgcgtcctccctgcgccttgcgtgccatgtcactcgttactgaccgtagctcccttgctgcaccgccaggagtacgccaagagcctcgttaagaaccctgacgacgtcgcctcgtctgcgccttcgtcgccgtcgtcgtcgccctcgacctcggttcccgagctgcccgcgtcctcggctgcggccaacgagacccagaacggcgacgcctcggtcgtccggtcgccgccggccgatcgaccggccgccaaggacagcagctcgcctggccgcgccggcgacagcgacgagtcgtgggacgtcgtccccgagggcaagcacgccgactcgagcgccgagcagggcacgaccggcaagcacaagcacggcgggctgggcctcgtcggcaccgtcatcggcggcctgacgggcggcctaacaaacggccttggcaacaaagccaaggagaagcggtgacccccaccccgcgtgcgcgctcttgtctctcctcccacccaactgtagcctagcctagacgccttcttacagagcggccgatcgcacacacacgcaccttctgctcgctctcgcacgcttcccttctaattccgtccactgtacccatggccctcgctgaaggatgaacgctgtccttgcaaacgcccgcaacaagccgggagtcgcatctatcggtcgagcccgcgctggactcatgagagtaggccgccgagggtcgccatctcgtcttgcgtgagcgcaccggcgagcgcgccaaagccgtcgtgctgggcgtacgtctgtcgaagaaggcccgttaggtgggcctgcatgtcgagcagcgcgatcggatcgtccgtgtcatcgtcgtcatcgtcgtcgtcgccaaacgtgtcgtcaaagccgccggggcccatcatgtctgtgtctcgggcaagtcggttagcccgagcgtctcgcacgagtgcggcaaagagcgagcacggcgcaccagacaggaagccaaactcgtctgtcggcctcggtccagtcttgaggaaggccggcccgtcgtcctcccaatcagcaccatcgccatcgccgtcgtcgtcctcctcctcggcctcctgctcccaagatgcgttgtagtcgccgctctgcttggcagccccagcctcggcgacgagcaacttgagcgccttgacgttgaacgggatcgacgagtactgagtcggcgctgcaatgagggcggaatgcccaatcagcacaggataacgagaccggggaacctcaatcgacggacgcactgctcttggtgcgcgagcgggtcatgatgactggcggacgagaagcgcagaggcgagtcagcgtcttcaagcacgtggacgggcgctcagggacgcaccctcggcgttgctctggttgatgatcatgtcgccccggacgcggatggtttcaagactcggccgattgctcgcgagcaggtcgccgagcgcgagcgagcttacgcgaatcgcccatgaaccgtggatctcgagtgcgctctcggtccaggccttaaggaggatctcgaggcccgagacggccgtcgaagaggacggaggcacgatcgacatcgactcgagcagcggcacaatctcctcaaactgcgtgtggatgaggaacgcgacaggcacaatgagcgactgcggtgagaggagtctcagtcagctggcgtccctcaaccacgaaaccagcgtttaaccctaacctgctggtaagtcgtgtaggttgccgtcgggatccgttcgacgatcgccttgacgaggtcaggcaggactggggcgacagctgggccggcatttcgcagaagctggacgatcaggtcgccgaggaacaggcctcgcgactcggactcggttggccgaagcagtcgcgcaatgacggcaaacgtcgactggaggccagactcgcccgtggctgcgatggtcctggagcaaagcggaagcggtcgctctgtcagcgcagtacacgaggcaagctctagtcagagaagagggagccggacgcacgagctcaagagcgtctcgcagtccttgcgaatgagcaggatgagcgcctcgacgccgttctgccggacccagagggtcagcacatagtgcgctctccccatcgagagccgcggccagcgcgcacctgggtgagctccatgtcgtcactattgatgagcgcggggaagatgacaccgccgatgccggccgtgaagccttggccggccgggtcgagcgggcccttgcggccacggaggacgctcgcaatgatctcgatcgccccggcagcgatcgtcgacgacgcaatgtcctccggctggcaaccctcgatggcagcgcaaagcttgggcagcgcgtgcgacatgagcgcgcagtacgaggtctcgtcgggcgtcgccgccagatgttcaaagatctcctcgaaaatggacgagatgatggggtctacgagaaaaggagcgcggtcagcatctggcgcatgtagtgagtgacagggggtaactcaccacgggcgttggttgcccagacctggagcatgacatcgacgagctggccggtcagaggtccgtcgagggccgtctcgtcgacgccgaggatggagcgcagggcttcgagcacgagcgcaagaacctcatcgccggcctggaggatcagtgggacgagattcgacaagatttggtgcgacatcggcttgacaatctcgacgggcaggtagcggcagaagctgtgtgcggcgagccgagtcagtcgagactcgctcgggcgcatctttcgcgcgcggctcactttttgatcgtccggaccgatgacaacttgacagagacaccaagctcagccgcctcgagtacctgaaccgcagccgagaggtactgcgatgccagactcggcgcgagcgcggtggcatactggctagcgacgacaaacgagcggccctgcaggaaggggaagtctggcgacgtcaagggcgagacgagcgtcagtcgagctcacgttatacgagcgagccgccggagaccgacccttggcgccgaggaaggttgggatgatcttgtcaaagatgaagccgaggtcaaagcttttctgcgcgaggcccatcgactcctcctcctcgagtgtgtcgagcaagacctccgagacgccaccgacgagcgcgagtgaggcctcaagcggcttccaccagtcggcctggctgctctgctgcgagcgagcgccgtcaatgctctgccggacgaccgtctgcagcacgcgtgctgccggcttggggtacttctcaagaagcgtctgcgtagggagggtcgtctcgtcagcacgtcaaggagtgtgcaagtcaagccttgcgcgcctcgacgcacagagacaaagtcgtggccggcgatgcgcaggctgtaggcgtcagtctcgtcatcctcgtcggcgacaaacgcgttaggatcgttggcccagttgtcctcctatgagaaggaaatgtcagtggggcgcatttgagattagtcaggcacgtaggatgagacgcacgtcctcggttgtcaggaccgtgaagctcaggacgacgctgactgcccgccgcagcgcatccgtctctgtcccctcatcctcaggctcaccaccaacgctgccgaggcttgtccggcccttggctggcttgagctttgcgccgaggccgacccactgggcgcgcagcctgcccgcccgggagacctcggtcaggaagtcaacgatggggcagacgacctgctcgatggtcatctcgtcctcgtcggccgcggccgccggcggcgtggcgtcgctcgtcgtcgagacgtagagggcctcgtacgacggtaggaggcgctcgaggagcgcaagcgtcggctcgagaagctcgccgacaagcttcaccgtcaggacacggccaaagatccggaagacagtgtcgagcgttttgaagatctcgcgctcgagcttgagcatctcccagccggcggcagtgtcgagcggtttggccggctggccgagcaggacctggaaggcctgcagccagggcgggaggacgtcctcgatcgtcgcattggccagctcgggcagcgtgtccttgagcatgtaggtcgtggagaggcactggcggtagactgcgatcgtcgatgcccgagtcgaggccgagtgagtctggaaacaaaccgatcagccgctgaaaatgtccgcagcaagaagggaaggcaaacgctgagagaccgacctcgttgccgaggacgccgaggaggacgggaccgaggccacggacgacgccgagtacacgctcgtcgccttcgacgccgccaccgaggtcgaggtcgcccttgcggacaccctcctgaaagacacgcatcgcgccgtgaacgagctcggtgctcgactctggcgaggcgaggatctgtagcagcggcgggaggacgagcgacgacgttgtcgacgtcaggagcgcgaccgagagcgagtgggccgattgggaccgcagcttggacgacggtagcgagagggcctggaacagcagccggaggagctcgctcttggtctgcaggagcgtttgtccaggtgaagttgagtggatcagctcccggctcccggctctcgatcaagtccggccaagtgagagctggccgcacctcttccgacaggcccttgccgaggacgtcccaccacttgtccataaacttcttgagaatgacgccggccgtttgccggacggcaggctcgacctgatcggcaaggacgatccgagcgagagcagttccgacgtctgcgcgtcaaaggcggcggcggcaagcggagcagggtcagcgagagctacgagcgaccgccgagcaggttcagggcacgagtggttccagccgctgcgaccggcgccgcccttccttctttcggtacccgcttggaagagggacgggggaccgaccagcgttgtcgagcgcgtgctcgagcgccttctcgcccgaccgacgcgtctcggtcgcgggctcgagcgtcgcccgcaacgtctggacgagctgggcctccatgggcggggcttgttcttttgaccggaggtgaaaagtctgctcaaaaggtccgtgtgctacgacctgggctgcctgaggagaaataggagtgcgacgctgtcgagctgaggcggcgaggtcgtggtcaaggcgagcgaaggccgcgctggcagaaaatcgcttccacgaaggtgaggcagcctggaacgcgaccagaacgcctgcccttcacaagctgaccgaagcatgctgaatgatccccccgtcgtgagcgaactgtagctctgggcttgcgacggcctttgccccagcggggaggcgaggaggtgagctcggcgggcgatgctcggcaggagcgagggaggtcgcgcagtcaagctcaaccgcccgtaggcgagggtccgtcgaggccgtctgctggacgacgactcccgcccatgctgcagctccgctctgaagtcaacagcagcagctcgcgagagtttgacgtcgtgctcctcgagcaggcggcaagcctcgaaggtcatcctcacggcgcatggacgttcatccagcccaggtgaggcggctgtcggccgggcgacgcagcccctctcgaccttggcttcgttctcctcctctcttctcgtgaccggcgagtgcagcgacgagcagacggtgtggccatttcgcagctaggttatcttgacagcattgcatggtagcccattgcagaatcgcaagggtgctgtagaaggtagaaaagaagggaataccggaggtctgggcgctgacgtgctgcggtcgttggtgcgcccctgaaccgacctagctcgcgagcagctgactcgctcttgcctggaccggtccgtcttcgatggcctcatctctgctggcaccgcccatctgctcgcccgcctgttgcttgcctggccacacatccgagccggtgggcttttgcggatcccgtcagaggggggcgctgtcgcgtcggtggcggcagcagaagggatcgagcagccacggcggccgagagagcggagaggcgtatgaggccgctgccgaggctgacctcccctctgcccaggacggccgagcgttctcgtcgggctcggtcggccgcgtctgggtcgagctggcgaagagggcggctcgtcatcgacgacggccatttctttgtggccggcccccgcccgtcgcccccgacgaccccgaagtgctccgccgagcggtcgctgccggcggcaacggccgcccacgggcgcgggcgaggctcccagcgagtctcgccttgcgcccggcactccacgacgggggcctctcctagcctcgcccaggaggcccacccaaccaacctccgctgacccgtccgctgacccgtcttgccgcgccccccgcagctgaagaacgccgaggccgtgccatccttcgccccttcaaggcagaagggtagcaagcctttttcctcttccgcaacgaccaccacctccccttccgacctcgctgcagcagacccactccccttctctcaaggcctctcctcgcgagccttatctgccctcagccgccggctcccaccacttccgacaccagcaagcagccctctcccaacttttgtggctttcgtcgcccttcttcgccctgccatgcccggtctcaagaagaccaccatcaacgcctcgtacttgtgtgtctttctccttaagccggctcggatgactgcgcagctcgactgacgccacctcatctatcctcctttcagcggtggcgagacgctcgaggaagactcgcatcacgagaacacgaatggcgttgactttgacggccagaccgtcggcgagccctcgacgtcgcagccgacgaccgccgtccactcgcgcaacggctcgctcgacaacaccaacggcggcgtccccaagggcgtgagtctcgcgcctctggcgtcaagcgctggtgactagccgctgacgacgcgcaatgtttgcctcccctcttaggccgacggccgccgcaaggtcatcctcgtccagtttgaagagaacgacccggaggacccgatgcactggtcggccgcccgcaagtggacggttgtcgccctcctcaacctgatgacgctcatcatcggtctctcgacgtcggcctactcgtccggcatcggcagcatgacgagcgagtttggcgtttcggtcgtcgccggccaggtcggcatgttcacgttcaacgccgcgtgcgctgtcacgcccctcttttttgcgcctctctgcgagctcgccggccggcgctggatctacattggcgcctttggctgcttcaccgtcattaacatcatgctcgccctcggcaagaacatcgggaccgagattgtcggccgcctcctttctggcgcatttggctcgatcggcaccatcctcgtcggcggcaccttcaccgacatcttcaactcgaaggacatctctgttccgatgtcgatctttaccttctcggccatcttttcgacgatcgccgccccgacctacgccggctacatcaaccagtacgccggctggcgctggatccagtgggtctcgctcattgcctcgggcgtcctgctcgtcgccgagatcatcttcctcaaggagcctcgtggtgccggtgagtcgcgcgacgtattcaattagcagtgcgacagtgaactgaactcctacgtcgccccctcttgcagttatcctccagcgccgcgccaaggcccttcgcaaggagaccggtgatgaccgctaccgcgccgcgatggagctcgagtctgagtcgatcgcccagctcttccgcgactcgtcgctccgggccttcaagctcctcttccgcgagccggtcgtctttatgtttgggttctggatcgcctttgcctggggcatcgtcttcctgttcctctcggccatcccgctcgccttccaggacaaccgcggctggtccgagggcaacgccggtctcccttacatctcgctcatcatcggctgcatcatcggcttcggcaccggcttctggcaggactcaatgtacaacaaggcccaggccaagaacaacggcgtcgccattcccgaggcccggctctatggcgccatgatctttggcccgctcttccccatcggcatcctcatcttctcgttcacgcagtacgcctttgtgtgcggccctttcttttcctacactggtgtctcgaccgtttgatgtgcttgctgactcctagccctcccccccggtcaaactgacccaaaccccctccgcaccaccctcgcgcgcgcgcgcgcgcgccagactcggatgcgcgtcctccacgtcgtcgccgagacgcccgtctcgttcctccagcacctcaaagacatcacctttatcgagaagcggccgttgaaggcgtgcgccgaaaggctgagctcgctcatcaagacgctcgagattaccggcctcgacgaatttagcgggctccagaaagtcgcgggtttcgcgacgctcgtggcgacgtatgagaagggtgcgttgttggcgtttgccgggctcgcttaggtgggcgggcggcttgtcgcagggcgctgacacacgcgcgcgtctctgctcgcttgctgtttgcgtttttcaggcttcctgctcatcctcgagccgttcgagaccgagtcggcgacggtcgccaaccccgtcttccacttcacgtacgtcctcccacccgagcctgacgcgcggaggccgcgcaccagtccatcactgacggcccctcctctctccccccgtttcttgctcgcgcgcgcgcgcgtccagctgcatggaccccgccctcgccatggcgcccgtctttgaaaagttctcctcggtcgtcatcacgagcggaaccatctcgccgatggacatgtaccccaagatgctcgactttcagccggtcgtcatggagtcgtatccgatgacgctcgcccgaaactgcttcctaccgctcgtccgtccccgacccggttcccccctcgccccccaacagcggcataactaactgacaggtcgctacccctttcacacaacaggtcatcacccgcggctcggaccaggtggccatctcgtcgcgcttcgaggtccgaaacgacccctcggtcgtccgcaactttggctcgatcctgatcgagtacagcaaggccgtcccggacggcatcattgcctttttcccgtcctacctctacatggaaagcatcgtcgccgcctggaacgacatggtccgtcctcctccctctttaagccttcgggcgaccttgcgctgacgcttcttttgcccgtcgcggcgtttgacagggcatcctcaacgaagtctggaagcacaagctcatctttgtcgaaacgcccgacgcggccgagacggcgatcgcgctccagaattttcgcaaggcgtgtaacaacggtcggggcgccgtcctgctctcggtcgcgcgcggcaaggtctcggaggggatcgactttgaccagttgcgttctggtttccccgcctgcctttccggtctgtgtggcgcttggagggctgaccgatcggctcgcgcctgccgactcacggatgcagcaactatggccgggcagtcatcatgtttggcgtcccgtaccagtacaccgagtcccggatcctcaaggtcggtttcctggctcgcgcgcgcgcgccaagctgtccgaagggtcgctcgcacctactgaccccggatcctcccgcgcccaggcccggctcgagttcctgcgtgactcgcaccggatcaaagagtcggactacttgacgtttgacgcgatgcgtcatgcggcccagtgcgtcggccgcgtcttgcgcggcaagaccgactggggtctgatggtctttgccgatcaggtgcggcctctggctcctcgcttctcgctcccctcgtctaacacccggccggggggctgacttgttttctctgtctctctcacgtccgcaagcgctttgcccgggccgacaagcgggccaagctaccaaagtggattaaccagtacattaccgagtcgcactcgaagctctcgaccgacatggccctcgccctctcgcgccagtttatccgcggcatctcgcagccgtttgaccactcgatcacgggcatctcggtctggacgtacgagcaggtgcttgcaaagcaggaggcggaacgggtgcgtcttgctcgcaatccttcactctctctctctcttcgtcacgatctgccgagcggcagcggctgaccatccgttcgagacccgctttcctcagcgcgatatggagaaggccgttatcgagccgccaggcgcccacacgacctcaaccacagacccctcgctcgcgccctccaagacgggcggctcgcggccagccgacgacgacgacgacgcgtttgacgactttgacctgctggtcgagcaggctggcttggacgacgacgacgagcgcgatgcgattgacgccgacgcagatgaggctgcgcgcgaggcgcacatgatggacctctcttgagcctttcttcctttccctccctctccccttcccctcccttctcttgctcgaccttcacctcggcctcgctacggtcgagctcatctgcacaagggttcttgcgaatccctccttcacgttctcattgctgccccttgctcttgttgttccccctagccacctcttttgcaacgctgtatcaaacgctcgcctataagaccctctcaacgccagttcgaagccgagcaggcaaggacgaggcaaaatgaagcgagggcatcgatcctcccctttcggctttcgactcgcaaccggcaacgggcagctcgtatccgttgcgcgctcagtcgatcaggtacttcttcttgaagaaggaccggaggtgcaggacctgtgtgtcgaccgaggagacaaacattcgtcaggctgaccgctggagagtggaaagagagcgagcagggctcgaggaactgacctgccagacgccgagcccggcgagggcgagcagcgtcaggagcgcaaagcgctggacgcggcggttggttgactctgggtttgaaaaagggagggaggggaggcgggggagtcagtcgctgagacgacccgaccgaccgaggaccgcgactgctcaacgcgcaagtggcacccaacgcgacccgacggtcaagcgccgacgaggtcattctcgctcccaaacggcccagcccaacgccctttcaagcaagaggccgagcaaaaccgagcgacgaacgcaccgttcgtatcccgcatgcgcgcctcgcgccgctgcaaataggccatctcgtcgacaatctccttgacgacgccctcgagcttgcgcatctcgacctcgagcgtcgagagcgactcttgattggcgatggcgctttgaacacaacggtgaaatggaggcaaggggaaaggagaagaggagggaggggaagcggtgagtcgggccgcaggcgagaagttgagcgacaagaaagggcggaggagaggacggacttgtagtcgaccgcatcggcgccaatgtcgacgtcgaggtcgaccgagcgcgagtgggcgaattggggcggggcggctgcgcagaggggaaaagggagaggtcaactcgcctgctctgggggtcgatatgggcaagggaaggggagggtgtgatgatagaagagagtgaaagagtcctagaggctttctcgcttcgtgtaaggcagcgaatggccgccttctgcgagccccgagcaggtcgagtgcagagtcggcgcaggtgaaccgccctcacgagcaggccctccgtcgcgccctcctctctctccttctaaacaaagatactccctgcgccgagccccaaggagctgtgccgcgctcgaccgagcgataagaagcggccggccgacaacacggacggaaagcgggcgcgagcgttcgcgaggcgccggccagaggtggctgaagcctgccggccttgcgcctcgcgcttcgcgaacggcctgcggccctgcagcgctgagctccgctcgagctgcgtgaccaggcggatgcaaaagcccaagctgtcgaaaggaccgatgtcgcacgaggccaaagagcgcaaaggatgggggggggggcgcaccatggtcgagatggttcttgaagcagacgccgacctcggcgtcctcgtgcgttgtaatagcaagcctcgtctcgccgctgatgcccttcttggagaggtaaatgttgccgttgtcggagccgtcaacaatttcaatgtcgacgcgctggttggagctgggtagcatgtagagaaagaaggaaggagggagggagggggtgagctcggccggaaggggggtcgcatcgtcggaaaggacgcgagcctcgctcggcgcgaggaacgtacccaggtccgatgttagccgtgacgatgacgagcgagtctgagtgcaagagggagggaagggttgaatgtcagggatcgcaccctttcggagggatagggcagctgcggacaacggctggcgcagggagggggcagcgatgaggcgaggaagagcgaagagagggacggacgggcgtttgcgtagtcccagatgcattctgtcagacgcaggagagggacaggtcagccaagcgtgctctaggaggtcaaagaaagggcgctctcgtgctaaaggccagagggggggcgagccaaaggttcgagctcaggcagcccgccagcctcctccggcagcaggacgggcggacgcactcgattgggggtagcggtctgcggcgaggtcaaacttgatggcctggacggccgtacagaggatggcgagggcgaggacgagccttgggaggagggccatcgtgcaggaggggctggttgtggttgggggtgcaggcgcgttgctcgacgcccgtctctatcgccaagtcctctcgcgtatgtgtccgcccatcctcgatgtagacttcattggctgcctttatattcccttgacaccatctgcgatgttgtgcgagctcacggggtgctgcaagctgccaagcgacgtgatctgagatggtaagcgcgacctgctgttgcacttcgaaccccctttcaaaacccttgggcagcaagaaacgaaagggatacatagtagaggggcaaaggaaggcagggagcaattgcagcacccctagtcgacctgctccatctcggacatgctcgaaaggtcagggacggcctcagccgacgacgaggcctcgttggacgagccagcgaccgggacctcgtcggcgtcgatcgagaggccgagtgagatcatccggttgatccggttggcaaacgacgacgggtcgtcgagcgtgaagcccgaggtcaggagcgacgtctcgtagaggaggaacgtcaggtcgcggaccgtcttgtcggccttgtcctcggccaccttgtccttgagcgtccggatgatcgggtgcgtcgcagaaatctccatcgtcttcttgctcgccatgtacgacgacatcgacgagtcgcgaagcgcctgggccttcatgatgcgctccctgtccagcgaggcgggggtgaaagggtcagaggagtggaccgggcaaaaggacccaacgggcggcgactgacatgttcgacgaccagccgaactggccggtgacgaggacgcagggcgactcggtgatgcggttcgagacgacaaccttctcgaccttgtcgccgagcgtctccttgatcgaggcgcagaggtcctcaaacgactttgcctcctcctcgcgctgggccttctcttcgtccgactcctcgagctcgaggccctccttggagacgcagacgagcttgaggccctcgaactccttgagctgggtgacggcgtactcgtcgatggggtcgacaagcaggaggacctcgaagcccttcttcttgaggacctcgaggaacggcgagtcgcggaccgacgagagcgactcgcccgtcaggtagtagatcgacttctggatctcgggcttgcgcgtgatgtagtctgcaggcggggcaaggaacggtcagcctagggcgctcgggagcgcggggcctcgcgtgagggaccaacccttgagcgacgtctgctcctcgcccgacttggtcgagtagaagcggaggaactcggcgagcttggcccggttctgggcgtcctcgtggatgccgagcttcaggttcttgccgaaggcctcgtagaacttggcgaagttgtccttgtcctcggcaatctcggtgaacatgtccatgcacttcttaacaatgttcttgcggatgaccttgagaatcttgttctgctggagcgtctcgcgcgagatgttgagcgggaggtcctccgagtcgacgatgccgcggacaaagttgaggtactcggggatgaggtcctcgcagtcgtccatgatgaagacgcgccggacgtagagcttgatgttgttgcgcttcttcttcgactcgaacaggtcaaacggcgcccgcttggggactggcaaaggtaaagagagtcagcgacgagcagcgacgcagtgcagagggaaggcaagcgtaccgtagaggatggccttgaactcaagctggccctcaaccgagaagtgcttgaccgagaggtggtcctcccagtcgttcgagagcgacttgtagaacgacgagtactcctcggccgtcacgtcctgggggttgcgcgtccagagcggcttggtcttgttgagctcctcgttctcggtggtaatctggccagcgaaatcaaggggtcagccgggcgcgtctcaaaggcaaaaagaataggagctcacctccttgaccttcttggtcttcttctccttgggcttgtcctcgtcctcaatctcctcaatcttgttctcctccttggcctcctcctcttcctcctcgtcgacgtccttctcgacctccttcgagacgacgagctggatcgggtacgagatgaactcggagtgcttcttgacgatctccttgatcttcttctcgtcgaggtagtcgagctggtcctccttgaggaagagcttgagcgacgtgccccggccgaggggctcgccctcggtgtcctgcgcgatggtgaaggtgccgccggcggccgactcccagacgtactgctcgtcgtcgttgtgcttggtcgtcacctggacgcgctcggcaacaaggtaggccgagtagaaaccgacaccgaactggccaatcatcgaaatgtcggcgccggacgagagggcctccatgaacgacttggtgcccgacttggcgatcgtgccgaggttgttgacgaggtcggccttggtcatgccgatgccggtgtcgcggatcgtcagcgtcttggcctccttgtccggcgtgatgcggatgtagaggtccttctcggtgtcgagctgcgaggggtcggtgagggccgcgtagctagacgacgggggaaggaaagcgcggaggttaggggcggcattcgagcgtaaggacggcccaaggaagaagcgcgcgacgtaccggaccttgtcaagcgcatccgagccgttcgagatgagctcacggaggaagatctccttgttcgagtagaactgcgaaggcggagcaggcgagaagaggtcagtctctgtctctctcgcgcgtgcaaaagcggcgcctccccggacgcaccgtgttgatgatgaggtcaagcagctgcgagatctcggcctggaagccgaacgtctcggcggcgggggcagacatgacgggcgagaagagagaaacggaaaggggtgcgggcggctggtggcgatcgtcgtcgtcggcgacgaggcgaaaagttcggacgagcgcagaggcggcgtcgaaggaggaagagcaagagcgaggcataaggcgtcagtcttgctagctctcagcgtggagacaaatgatcgagcacgctggctggcccaagagcgacgcccgccgaagagcgacgctcgacgtaagggaaggggtcggcgacctgccaggaccgcctcgcccgtccttcatctcgccgccctccaccagcctggcatgccaggcagcagcgacctcgtctagccagctgctcgcgcctctccaacggcagagctctcagtggacggcaggggcgactcacgtatgcgggcttttaggatgttgtcctgggtcgtcaaaagatgaaaacctggggtcgagctgtggtggtgaagagaaggagagaaaggagagcgtgcttcccaggcgctgcggcgcgccagcaggcgcttttgttgcgcgcgcggccccggccgttcgttcgagcaccttcgaggcggtcggccggcgcccggttacctaatcatgatcccgcgtcggattctgatgggctctgctccgtctgcctgcgctgcccttgtctcctctgtcgaggaagagctgcccagcaggagggcgagaagcgagtcctctcttgcctgctgccggctttctcccagaagtgatcgagggtcgacgggcgctcagacaactcatacaacttggccatgcagacaaatctcctcctcctacgagagctccctccctctcagttcttgcggtggacgacgcccggcccggcctggcacgacggaaagacaaagagctcggcaatctggacgtgcttgggccggagggcgacccaggcaatctcctctgcaatgtcctcggcgacgactgcggcgacaacgagtgagacggagggaggtcagacgtgattgtccgagatgggtaaaagggcaaggcgcaacacgtacgaggctggacgccgctatagaccttgtcggcagcagccttgtcgccccggtagcgggtgacggaaaagtcggtctcgaccatgccgggctggacctcagaaaccttgatcggggtgtcgacgagctccttcatgagcgagcccgagaacgagcggacggcgtctgtgctcgtctgagaggtcagcccggcgagaagggtaaagcaggtgaagggaactttggggggggggactgacgcttcgtggcgcagtagattgcgccgccggcgtaagcctcccggccggcgaccgagccgaggttgatgacgtgcccgctctgacgcttcttcatcccacggaggatgacctgggtcaggtgaatcaggccaatgacattcgtctggaacatgacttgagagcggagggcagcgggaagagcagggtcagtgtctgtgcgtgggcgatccggccgcgacaggacgacgggaaagagaccgactgtcaatgtcgttattgctgatgtctccgaccttctcgacacccttgacgagaccggcgttactgaaggacgaggcatcgctgttatcagcctcgggtcagctgaaagaggatgcgcaacgccgacccacttgacgaggctgcgaggatggcgggcgagacaagatgcagaggtcagtcgcctagcgcaagcgcccactgcacacggcccggtacgcacacctcgaccgagtctacctcgtcctggacggtcgccagcgcgcggtcaatgtcctcgcgccggctcatgtcgcactcgaccggcgtgaagcggccgccctttccgccggtgagcgaatcgggctgggcctcccaggcggccttgcactcgtcggcgaccgccttgagctcggctggccggcgggcgagcaggaggaggttcgctccggcctgcggatggcatggaccgaaggtcagccggccgggggcaagagatggcgcgatgcgcgttgccagtcgagccaaacgcaccttggcaaagaggagggcggtcgccttgccgattcctgcaggcggcgacactcaaatagtcagcgggcttgcctgttgaaggatggcagtatgacgagggctgccggccgatgggaccaacctccggaggcgccggtgatgaggaccgtctcgccctgaaggcgggtcgtgttgaagagcgacatggtacgcgagatctggagctggaagagggcggctgggcggttggtgaggaggagggcacagagacggggggctcggagcatgcacagctgctaggcaaagggatggacgtttggagagaaggggacggcgcctgttctctcgtcggaggcgtgcttcgggccagagatcgccggcctcgtccgaagccgctgatgcaggtctgcagagtaccgtcgacgagcaagggttcgcgcccgtcgtcgcccggaactcgtcacgaaggacgaacgacgacgacgacgacgatcgggcttcgagcaagaccgtctgccgccttccttgcagaccaggtcgaaagcagcactccttggtcggtcctggcagctcctctgtgttcgtgctgctactcagtctaactttgtgcctcctcacttgctccgcctggccagctccgcctcgacggcaagacgccacccgcagcagcagcagcagccatgcacttcccgctcccgctcgccgcgcctctgccgttgacgtcgggccgctactgggccttgctcggtgcggtcgacggcgtcctcctcttgctcgcctggctcgcccagcgcgaggggacccggccggcccgactggcgctcgtcccgctcgcgtacgccttggtctggcagctctcgggcggaatcgcgttcgagcggccgctacacgagtggctgaactacgttatcggcttgggcggtgtctatgtgcgtgtgtcttctctctgcttcgactccttcatgctgaccattttctgcggccggcaggtcaccctcctcattccacgcctggccctgctcgagaccccctacatgcacccgcggccgccgccatcgacgacgatcgacctcctctcgaatccttcgctggccggctggaataagacgccgtactacacgccgccgcggttggtcaagccgcccttccggtcggcaggcgcccacctgctcgtcgttctccgcgacagcagcgtcatgtttgcgctgacaatgctcgcccggccgtttgaccggctgctcgacatccgcggggcgagcatctgggagctcgccggcgagaatgtgccttggctgccgctttgggtgccatacgttcacccactccaccagaacgtcggtgccgtcggcgtgacggccatctttggcgtgcgtctctccatgcgcgcaagcacaaaagccccccccacgctgactcttgtctcctcacctctgatagctctgcgtctacctctttgtcgagtgcatctatcattcctgggcggccctctcgatctcgctcggctgggcgccgtccgagtttggcgagatctttgaccggccctggcaggccgaatcgatgcacgacttctggggcaagcgctggcacccgctttttgcgccgacttttgccttttacagccatctcctgccaccggtccttaagccggccgccgtctttctggtcagcggcctcatccacgacctcggcgcgctgccgttcaggccgggcgagctctcgccggccatcaccctctttttcttcgtccagtgcgtcgcgctcgcgctcgagcggctctggtcaaagctcggcctcggccgtgtcggcggctggctcggtcgcatttggacgatcggctggatcgtcggcaccgggatgattgtcgtcgagggctggctccagaagggcctgctcggcatggccgtccgcacaatctggtccgctgtcggcgtcgacaagtactaaggctgtctgtgcgaggttcatcggtctacaccgccgggcccttgggttatgcatctagatgagcgtctatattgtccgctgccgtcgtacggttggcaacggtgacggctgggagcgagcgcagagagggtcacccggtgcagcagatgcgcagcttccttctctctttgctgagcgaccaggcgaacctaatctggcagcttccggcgacgatgctgggggcgggcaggcaggcaagatcggaagaaggcagcgggcgcgcgaccccttttggattctgcccgccgggccgcccgctggtttcagagcgcgcgaaggcaggctcgtccttgtctcaaccgaacgacgacccgccgtcgaggcccaaatcttgggtgcccgctgagccacacctaaatgagcactattcatcgctttggccggccatggaccgaacggtcccacgtcaaaggcccttgttgaaccgtaggggggcaaacactatgacctgccggacccatcagcggctcgcggcaccggcccagcagcagcagcagcctcactcgacacccgattcaggccggccgtcaagaagcctgaccagctggcttgcctcgacccagctaggtagcagccatcatatccagcccgaaaccaccacagccgactcgaccagtatcagcagcagcgcccccctctccatcgtctccgtagggtgtcgtagaggtacggacgagtgcagaaggatacatatggtattatgcagaccaaagcaacctcgcaagcgttggcggatgtcgcaagatcagtgaatgaaggtgcgcaccaggtcggctcgcagcgcgggccacgacgcctacaattctcgaccggcgcgaacatggcaagtactctcccccgtcaagcgttcgctcagagggacggagggaagcaggaacattcccagagagagacgctttctgatctcacggtcagcgtgggccgagcgagggcaagaggctggggagaattgccaaccggaggagggtgcgcagcggagcagtagcacagcgatgccactgcccagtctcaagccgcttcaggtcgcccgccagtaacgaggaatagtggcgacatgagagaggggcaaggacggggtctctggaatcaacagggatccataccttggcacaagtcgggcagacgcggagaggacaagttctcatgatagatcgtcaatcgtcaaagagcaaggagagagatgggtggttgcatggtgtacacagtcagtctgaaccagccggccgtcaatagcgcccgacgccgccaccgctgcccgcgggctcggcagactcgctcacgctccggcgcttgccgctgcctccgaggccgaggttcgaggccgcgacggccataaagctcattcgccctggcgagctcgcgtacgcctgctgctggtcggcgtggggcgagccacgcgaaagggcgccgaggtccgagctcgacgagtgcttgctgaggtgcgcggccgccgccgacggtggagggagggccatcgacgcagacagaggctgggccgccaggccgacgtcgccaaacggctcggtcgaggcggctgtcgtcgctggcgctttggcaagctgcgagcccgacatcgtgaacgaccgcggggggaaggcgcccccgagcgaggtcggccgagggaccgaggacgacgtcgtggttgacgagatggacggagggcgtctcgcggggatcgcgatcgagcgcgaggagacgtcgcccgccgtcgttattggactgctggtggagagaggctcagtccgcgagcggatgtgcgacggagggggagaaggcgaggacgcgggggccttcgttaaggacaaaggcggcgccggcgaggtcgacagcggcagttgtgaaggcgcggagggggccggctcctcgctcgttgggaggacgaccatcctgccgggcgtctgcatcggcggcgcgggcgtcgtcgccagctcgaggctctgcattggtggcgggaacgtcgaccgatgaccaaacgccgttgatgaggacggctgggtcgctgatagcgccgaagccgacatgcgcggggcgaccgtccgtgaaaagtagtcgctcgcggtcgcagcgccgccgttgtgcgacgccgccgctgcagcagccgctgcgatggccggcggtgagaaggcctgcctgacgtcggcccggtcgatgatcggcgacgttgccaggcccgacgccgacgcagggttcaaaatcgagtttgaccgcctcgggactggggccgctggcgactgagcggtcgtacttgcctttcgtgagaagatgggcgactcgggcggcgccggaggctgactgctcgaagacactgaccgccgagctttcgagcggacaggcgtcggcgcaaaatcttccgtctcgaggacgaagtaggtcgtcccgatcgggaggccgacatcggacccgctcgcatcgcgctgaaggggccgaggaagcaagccgacgtcagctgacgaatgaaacgcagggacgggccgcctccgacgcacctcactgtcggccgtcaccgtcttttccgatatggcagtgatacgtgcgaggtggtactcgcgcgagaggaggtactcggacaatgtcgccgacgtcttgaggaagtagtgtggaaagttgacctaaggatcagagagcggctgtgtcagcgaagagaagcgcttccctcttgcctggctgactgcttacattgaacgcagcccagggccggaccgcggccgtgtagtttcgggttgggaggaatagggccaggtcgcccggcgaaaagtggccgatcgcaatcttgtctctggccttgtcgcggtacctgagcacggcgtgcgcagacgctctagcggtcagccacctgcgataaaaggtcttaataagaggggatgagctcactcggtcgccttctgctgccacttcttgacgagcttgaaactcttgaggatgacctcctcgaacgagcgaatgtcaaaccggccgatcgcctcgagctcgcgccggacgccgagcgccgaggccaagacggggatttcaagcgacgacgtcgacgacgctgccgagggctcgcttggggcgagcgtcagcgactggagcgagagcgacgaagcgagcgacgacgagcggatcgcgtcgagcagcttctctgccgagtctttcagcatccgtgcgagccggagcgcgtcggcgagcaggcgggccgactcgttgtccctcgtcgccgcgtcggcgagcgccttttcgagctggccgacgagctccttgttgcggacctcgactgcttttgactgaaccttctgcatcttgaggtcggccttaatcgagtcgacctcgcgcgtcgccttgtcctttgcgagcctgaggtcgttgtcggcctgctcgcgctggcgctccgactcggcatttgcctgggcgagctgatgctcgaggatagcccggtcgctgcgagtgcaagattgaaagtcagtaagggaaggcaggtcgggtcgagccgcaacaacttacccgtcggcctcggagatgtgatcgcgcaacgcccgctccgactcgagacccttgtccctcagccggcgctccatctcgacgccgaggtcggtcaggcgctgctcggcgccctttgtcgaggccctcgcccggagcagcgcatcgtcgaggtcctgcgcacggatctgggcctgcgcaagctcacggacgtgcgctgcccgctcgcccgcgagcttcgttacctgagcgtccatgttcgacttgtctgaccggagagcggtcgcagttgcttgcaagctcgtgacctcggccctgaggccgtcggctgtcgcctcgtgcgagcggctggtctccgagacggccttcagctcctcctgcgcggcggcgagttgcgcccgcaggtcctggatcgccttgtccttgctggcgaccgcgccagagagctcgtccttttctgtcgagagcgtcttgacgagcgtctggtcgctgatggcggctgcatggaggcgaaggagcgaagatgagcgagtgcgaactcaacggtgggccagtcgcgccgacgtacatcctcgacggcccgagccgtcctgcgatcttgacagcactgttgatgacggaggatcggtcagagagcaagcaagggcagacaggatggcctgggacaaacggttcttctcgatgagcttgtcgaaatcggccttggcgtcctcgacctgggcgaggtgcttcgagagcgtctctcgcaggtcaacgagcaggccaggtttgtcgagactggcggaagcggccgcaagctcgatgtagcctggatcgcgctcgagcgcctcgatgaagctaagaaagtctgcgtggcgtggcgtggcatccagtcatcagcctcggtgggtcccacaacgtcgtaagctgagactgaccgtcgacgtcgacctttgagacggccaggccgtcctcgccgaccccgcctccaacggtcgagacctcgagcccgggcacctcgtccgtcgtccgggcatcccaaggtaggaggcccttcatctcggcctcgtacttctcgcgccgccgccgctcgcccgttacccagcgggccatgacctcggccaccttgccgctctgctcgaggaaaaaggcgccaaaggcgagccggcgatacgactcgacgagcaggcgaccgtaggcaagcgggagcgaatagagccgcgagaggtgcgagaagccgggcggggagcgaagcgtcgctgagagggagttgagagtcgccgccattggcgggatgaacgactgaaaatgcgagatcgactggagggtgtggacgaggtgggcgttgaacgagttctgcgcaagcgaacaacaagagaacgagtgagtaaagcgcaatagcaagacgcaaagtcgacaaaccttcaactcagtcaggagctcgaccttctcccggacgagacgctcgaggtcggcaagctcgcggagcgtctcgtccgagacttcttgcgagccctgcgcctgctgctcgagctcgcgcgccctttcgacggccctttcggctacggcaacacagtcgtcggcctcgtcgcaacttggtgagaaggcgctcgtcagtgtcggaacctcacatctgcgatccgcctcgaaggcttacgtctgcgattcagtcacggcgcggatctgcttctcgccctggagaagctcctcgatcgacgtctcggccttggcccacttgtccgacagttcttctgcagtggaccgattgggtcagcaacgggatcagggcgcggcgcacccgcgtcggacgaaccctcgagcttaacgcagccttcctcgacgacggccatcttcttgaggttgacatagtcgccgagcttgcgctcgccgtcctttgtcttgccgctaaagagccgcctgtcgacagcgatacgttcgacgacccagagcgcggcgcggtaactcgcgagcaactcgcgctggcgggcaaactcgcgcgcagcgagcgggccgagcgacgtatggaatgaggcgagcgagccgagatgaagcgagaggttggacgcggcgaggacgagggcgcgagattgggtgtggaggctgtcgacgagcgggtagacgtgcgtgtcgagcgtttcgccgagcgcggcagaggctgacgcgagcgaggccgacgaggccgagagcgagagcggcaccggcggcaccttcttgatttcgagcgcagcaatcacctcgctcgcgtcggcctggagcgtctccttggagaaaatgtagagctacaggggtcgaggcgagtcagctttaagggggaggttccggccgggtgtccccccttggttcgtacgcacctcatcccagccggcggagcccgccgagagaacattgtcctcccggagctgctcgccgttgccgaagaaggggatgacgtcggccggatcaacgcaggtgagctcactgaccgctcgtctgagcgagtcgagcctgctcgaaaggaacggcaagacagcgatggttcagctcggggccgcgcgcgggtgcgagagctctcgcggccgaagcgggcgacgagacggacgcacgtctcgaagacagcaccgggcgggaacgcaaagctctggccgtcgacggcgcggtggacgagaaactcggcagccatcccgggccgctactcgggggttgcgaggtggcgtgcgatctaggcctcgagttgtgtgagcgggatgaggcgaggagggagagggaggtggaggcgggcagactgcggtctggccggcggcaaggcaaggggatcgggaagcgagtagctggcgtcctgacgcagggatgaagctccagaggactgctggtgatctctagggacgagggctggcgctcggagtctagggttgagggtgcttgggcgatgtcgtcgctgccgactgatggccactctaggacgagccggcgcggcctcccccgcagcgccgctgttgcaactctcggggaccccagcgttgcgatacgactcgactctctcatcactcgcgagccggggcatgagtctgacaggagactaaaggcaggacgggcaagggagggggctacaacggatgagatggatacagatgcggttcaggacgttccgagcgtcaggcaaacttgacaccctcgccctcctcgccatcgtcgccggacgggaccttgaacacctgcgccttgccttgcttcacgaggattgccagggccgatcggagcagcggcaggggcaggtcgtggaactctggagtaatgcgaaggggatgtgaggaagaaagagagagcgccgcgcagcgcagagaggacaaggagggtcagcaagcgcttcttccgcatcgttgaccactttgctagacgcactcttgcctccctcttccgactggagctctgcaaacgtcagaatcgaattggtctggcctgtgctcgagacctgtgaatttccgagagcgcgtcgttgtcagggtcagcctgcgagagtcgcttcaaccccgccaacgagcaacgcacccagtcgtagatctgaatcgcccactcgtccggtgtctgccaatacaagaggacggccgtcggcggctcctttgaactgcgcggcggtaacggcgggagcggcgtggcctggcctgaaggagagcgacgtcagaaagatgcgagtcagcctcgtccttctccatcagcttgcccagcagcacacgcaccgtttgcgacgagggcctgcatcagctgcctctggtactcgcgcccgcatcgacgcttgagcgccttgttctcgaaggcgcccgccatcgcgccctcgccgtcgtcggccgcccggagctcaaagacgcgatgccagcgcgcgtaactgagaaggagcgccgtccagagcgtcgtctggtgcgcgtgggtcgctgcgttgggctggggcgtgaagaatggtgggaaggaccagattggcgggaaaacgtagcccgaggggctggtgaccgagctcagggctgccggattagaggcaggaggaggaggaaggggctgcgccgagccagacgcaactgacgacaacggcaggacgctcgacccgcctcttgatgactccatcaaggctggaacagagagcagtagtcgggcagagacggatccgacgagcgaagcccttgtgagtagaagcggaagacggaagtcgaggtgcgacggctgctggagagatgatggcggttgggtacgagcgcccggtcttcgtcgacccttgctcgctctgcgtcgacatccacctcgctccccgccctctcaacgcctgggctcatgacctcgctgtacgatcatctcgacaagccgtcgctcaagacgtttgtccagacggtcagcagggctttctacgagccctcgcatgtcatcctgctcgaccagctgctcaagcgggacgcgtgcgtcgtcctcttgctcggcggctctcgaagctcacccaccggctgacccccccgtctgacgcaacggccgcccttcggggagactgcagcttcagggaggatgacctcgctgccctcactggggtcaacacgaaggacctcgcccgcctggccggcccactgatcggcgacgggctcgtcatgcggtgcgccgcctgcctgagctccggcctcacctccgccccgggcctgaccgacctcctctcgggctcaggttcgagcggctcgagcacaaggaggcgaatccgccgccgtacgctcggccgatcaaccgacgatactactggatcgacttcaagcgcttctccgacgtcgtccgctggcggatggacatcctcttcaactcacttgacaagaagctgcgggccgtgcgtaggccctggctctgaagcagcggcgcatcggcagctgacgctcgctgatcctccgtctataggagcaagagaacaagggctacatctgcccgtcgtgcaagaagacgtacctgccgctcgacatccccgccgagatctcggccgacggcaactttctctgcgacgtctgcgcaaacccgctgatcgacaacgaagagagccagggcgtcaagggcgagaaggacaagatggccggctttaacggccagacaaagtggatccaggagggcttgcggaagacggccgagatgctgttcccaaagtgcgcccgacggctagctcggttggggagccggcaggccccgtttcactgactgtcgccctgcgcctcgcccaggttcgatatccagcagtggctcgtcgagaatgcccgcaacagcgaggcctcgacgtcgggcatccaggtcgacctccagctcgacgccgaccaggagcgcaaagcccgagagcaggctcggctggccgaggagcagcggtctgtccgcctcctttgctcttgcggatcatcatctaggctgaccgggtctccaactccgaattcacagctctcaaaacgccctcccggcctggcatctgtactcgaccgtctcgggccagcagaccgcgctcggtctcgcacatgccgcccaggcacaggcgtcactcgaggcggcccggctcgcggccgacggcaaggacgctcagcgggtggcggacgagcgtcacacgcagtgcaagtcgaacctcgccctcatcacatttgaacgcccgctaactgcgctccgtcatatagctctcgaggactattaccgcgaacggcaaacgggcgcgggtcaagtcccagggacggcgttcgcaaagaaagaggagatcgacgccgacgacgcgcggggtctgcaggtcgcctccggcgtctcctccgccaagcggtcacggagcccgagtattggcctgggcggggatgcaggcgagagcagcaagcgatggaggggcgaggacgagggcggcgcttcagccgggctggaggagccggcagatgaggagggcggcggggcgcaggtcgtcactggtgagtcctctcttggtctcccgtacaagtacaacgctgatagccagcaccatcgcagttgccggtgtcgagaaggcgtttgacgacgtgaccgaggaggaccaggagcagatgacgcccgacgaatacacagtgcgtcctggagctcggcccgcgagtgcaatgcaaaccgggactgaccacctgtcggttgcccgtccgtcctccagctgtacgccgagatctggcaggagctcaactcgtgaaatcgatgcgacctttgtgaaagttgtggcgggacgccgtagcaggtcgactcgagcgcgagcaggagcggggcctcgatggaatgcgagccggctcgtgttggctcagacgggcgggtgcgagagaattgccttcgtgcaaaggtcaaacgagaggaggaggaacgagggcggcggagcaggaggccgaggagcagcaggcggttcgtccgttgggccatcttacagggtgcacgtcgggtggcgggcgggtgagcaagtcggtgctgcgcgagtcctgaccgtcgacatcgaccccgaccgaccctcctctagcaaggcagccagcgcaaggctagagcaagcccagacaatccggaacgatgcgcctcgtgacgtggaacgtcaacgggctccggacgttcatgaactgtcagtccctcgtctgccgctgctgtcaccgcgcgctcgagccgacgccatcggacgcgatgctcgcacctcggctctctgctggagacgctcgctgacgctggctgtcgtccctctgcctggacagacgacccgtccgtctcctgccttcatcggctgccagcaagcgctctcccggccgcgatatcaggagggctgaccccgaacgagctcgtctgacggcccacccacctcgtcgcccgcagcttcttctcgttcaagggcgcctacgaccaggcgtttgacgcgctcggggccgatgtcgtctgcctccaaggtccgtactccatacgccaccacccctctcctcgctcaggccggccggctgacactctgccctggccttctctcgcacgcgcgccgccccagagctcaaaacgccccgggcagcactaaccaaggcacaggcggtcatccccggctacgacgccttcctcgccctcccggcgtctgggaaaggctattctggcgtcgggacgtggacgaagcaggccgtctgcgtgcctctgaaggctgaggaggggctgacggggctcgcgcagcagcggccggcagtgctgttgagtgaggacgaacggatcgggccgtaccctctcttctccacgctcgagctcgttgacaacccgccttcgcccaacggcggtactcccggcggcacgtttgaccctctgtcgctcgacctcgaaggccgctgcgtgatgctcgacctcggcctctttgtcctcgtcaacgtctactgccccaacgagaccaacgctgaccggctgccgtacaagctcaacttcctgcgcgtgctcgaggcaagggtgaggcacttgacgagtgaggggagggaggtcgtcgtcgttggggatgtcaacgtcgtccatcggccaaaggaccatggcgagggctcgctcgcgagcaagcaggagacgttttggaaccacccggtgcgtgcgtgcgtgcgcgggcggcccggttccaccccctctcacgaggggcgagcagggaggcatacagatatcccagccttcgcgctgctgacggaatgcacactgacgttgggttgattcgtgtgcgcaccaggcccgaaagtggtttgatgcgctgctcgcgccaaagggcatcctccacgacgtcgtccgcgagcaccacccaacgcgcgaaaatatgtttacctgttcgcgtccccacccccttcctccccgggcttgccttgccttacggtgggctgaccggcgcttgctcgctcgcgcgcaggctgggaaacgcggaccgacgcccgcgcgtccaactacggcacgcgcctcgactacagtctgtcccttaccactccctccccccttctctcatgctctgactgacccgcgcgggtcgcacgcagttttgatgacgcccggcctcctaccgtgggttaagcacgcagacattatgccggacgtaagagggtcggaccactgtccggtctacgtcgacttctacgactcgctgcctgctccgccgacagcgcccgcagcatcgcccttctctgccggctccggctcctcggccagcaccccgcggcaaggcagcaccctcctcctcctcaaagacctgctcaacgtctcctcctccgacccgacccgccaaaagcacgcctcaccgccagacgcgagcggccggcgcacggcgagtgcaccacctcgagcatgtgcggcgaacgacgaagggttttcggagaagagcatccggagctacttcactgctccgggcgggaaagctggggtgtctgatcccttgtgctcggagtcgtcgacgacgacggcgggcaaagggaaggaaaggcagacggcagcggtcggagcagcgtcgacccctcctccaacgctgccggctacgtcgacccgcccagatgagccgatcgacctgacgtcctcgcccgacctctcgtctttcaagccccgctcgtcgtcctcttcctcaaaacccaagccaaaacccaagccgccgccgctgccaacgatgccgccgaagaaggacaaaacgccggcggccggcccagggaagggagggcagatgaagctctcagcattcttcaaaccgccttcgcccccgccggtctacaagaagaccaagcgctcggctccgtcgtcgtcagtgacgccggcttcgagtgctggccggccggcgaagcgcgcgcgccgcggggacggatcggacgctgctggctcgtcgtcgccgagcaaggcagcgagcgagtggacggccgaggacgaagcgagagactatgcgttcgctcgagcgctcgctgatgccgactcggcctccgccgccgcctcctccgatgacctcgccatacgttcacagacgtcgtcgtcgttcaacggagcaggcgaaaccaagccgatcaacagccggcgaagcaagccggcgccagagccgccagcgaaggccgtctggggcgcgctgttgaagcggccgcccgtcccgcgatgtacggtccatggcgagccgtgcatcgagaggacggtaagtaagccggggccaaagtacgtgccccccctttccttcctggctggctgccggcctcgctgtgaccagcctaaaaccttgtccggccttgcctccctagccccatctcatcctccatcaacgcttttcagacatgcctcctcctccaattgacacactcctcggactagggtccgagctcggcgccttcctcgacgtccttctcgagctaacggcgccgacgagcgagcgcctgacgaccgagctccgcgcgctctacgccgacgaccgacgtcggcggccgagctcgcacgccgagctcctgcgcgatggcgaggcgcttatcgaccgctggggaggctctgaagccaaggtcggcttcgtcgagggtcatcgtgcgtccggctttgcggtcggctccctggtcatcgctctaggcatcgctcggagggaacgcggactgatgagccgcccaccgttttccttgctacctcatgcgctagctcgaataggcgagggcgacgtcctctcggagctcagcagtcgagagcagggcttgctgagcggcgggccgccgacgacgcaagagacgctcgatcggtccgtcgacctcctccctcctcgctgcgcggtcgccttcgtggccaatgctgagcctccctgactatatcgtctcgctctgacgactggacgcaggctcaaggatctgaacgcagaatacgagcggtgcttcccacgtctgcgctacgtgacgtttgtcaacggccggtcgcgggcggccatcgtccccgagctcgagcgcgtcgtcgcgcccggcaacgtccggccggtcgggagcgaagagtgggtcgcagagggcgagcgggcggtgagggacgtttggcggatcgggcacgctcggctcgagcagatgctcgctgctggcgagtgatcctaaggaaggtgcgacgcttgaacagttcggttggccagagcacagagcgagctcgtctatatctccatctcgtcgtcgtcgtcgacgcctctcggcccgccgtcagcccccctcgaagcggccgtcacgcccaggtcgctcgcgccgacgcgcttggcccactccttgacggcgccctccatctccttcctcagcacgccgaccgcctcgcccgcgacgcgcacgcactcctcaaagccctcgaccgtcatccgcccctcaagctgggccgtcgtaatcttgcccgagcgagggaggaaggcgagcgtgacgtgcgggagcgactgctcttccgacgcggtcaggtcgagcagcgtcgtctgaggctggtagggcgtgagagagagggcgaggagcgagtccgagagcgagatgcccgacgtcaggagcgagagtgtcgttgcgttcagcgccgtctggaggagggctgcgggaaggggaggtcaagggaggggaagaggtcagcccctcgtgcaggactcaagaccgtcggtcgtccgctagaatcaccgccgtccatcgcgaggacctggatgtagatgttgatctcgctccgcgggtagaggctcgtcatgataacgggctcaaacgtcgtcttgatcgcctgagcgagctcctggatccgcctggacgagggggtgttgcgcagccgctcgtcagctcgctcggtcgacgaggtgagcacccctccggccgtcaggcacgcacttgtcggtccgaccgcgcttgcgccgctcgttgcctgcccagctgccaacagcaacgtcgacattgatgacagcccggtcaaagagcgttccgccgcgattgcgggcctccttcggcccatgaacagccgaggtgacgacggtgaggccgtgggagcacgtcgcgagcccgtcggcgccttgcgaggccggggtcgaggtcgggatcgaaagcgagaaatggcggagctcgtttggccgacggaagtctgtccggagacctggtaggagcaaagggaggagcggtcagtcttcgagcaggagctcgatggagagaggtggcggcggcggcggcggcggcgagactgacctccgtcgttcacgatttcttcccttgagctggccatgtcttgttgtcgtcgagctactgctggagtacgagggatctagggtctgactgtcgtgcgaaaggcgtcaaagaaggggtccaggtcaaggtccaaacctgctggaggcgagccgacgctgggtgctgctgcgaagcgcggccgccggcgcgccgacgcgcagagagcgagaggcgacgacggccctccttgccccgccaacgacatcgcccctcctcgcatcgcataatggccgcccggaagcgcctcaagaagaaggttgtcgaggtcgtccagacggttccgctcaagcatcgcttcccggaggatgacgacccgagcccgtaccacgacggccgggacccggacgcggccgacgacgactcggacgacgacgagcagccgacttgggccgattacaaggagacgttctatgagggtttgtccccctgtccagctgctgggccggtccccttgaggcggtcgagctgaaagtctatctgccctcgtttccccccatcctccctcgcccgcgccgtgcgcgtcgcgtcgtcgcgtgctcgtgctcctcgtgccgtcgctagtcgtcgtccagtacccgatggagcaacaccgcaacgcccagcagctccgggcgctcgacgagaagctgctagacgatgtctcgtcgctcctgcgcgaatgcgagacgtacgccctgaaggcgatcgagggctggcaagacgacatcgacccgctgtgggcgagaagaagcgggttgaccgagagccggaagcggaggcgatcaggcgaggaaccgtcgcaagcagtggctgggtcatccgaacggccagcgccactggctttgtctagtggagcagcggtaggcgaggagttggtccgcgcgacgctgcctcaatcggacggcgaggcaagctcaaccctgcttgtcggcgactcgacctcgtcatccggacggcagaacgccgtcgcctcctcctctcgatcgttcccaggtgcccctacgacagctcttatccagccgccgttagcgccccgcaatccctcccatgcgagcacgatcgccctctgccggcagaaccccatcacggcctcggagaaggtgtcgcttgcggccgacgcgtacgacaagacggaccggcacatccggacgctcgactcggagctcgaggcgcacatgctcgctggcaggcgcatgactagccgcaagatccctggtctcttgagcggcagtggcgggtctggcgcagaggagaacgaccatatcgagctcaacgacaacgacgatgacgaaggctcggtgctcgaggttcaggccaggccggcccgttcgcgtaagggcaagggcaccggcggtgggaccggcaagaagcgctctcagaaggagcttgacggggcggcggcgggcggcgcaggggacgacgttgacatcagcggtctcacgggcgaggccaaggtccgagcggctctgtcggcgccgggcgttctcctccttgagtgcgtctcctcgggcttctcatcgccttgacctggagacaccgctgacatccttctctctcttgtcctgaaggggcgagcccaactactgcttttgcaacctgccctcgtggggcaagatgctcggctgcgacaacaacgactgcgagcgcgagtggtttcacccagattgcctggtccgtctctcccctttgaagctcgcgacgaccgaggctgaacctccactcctgctcttctcgctctgcagggcttcagtcagaccgagatcccgacgggcgagtggtactgcccagagtgccggccgctattcaagaacaacggccagcgcgctaagaagcgccgcctcatctagattgcgcctccgcccttcttccggccgcgcgcctcggccgccctcctatacctttgtcgactcgtttctatcctcatgttgttcttctttcactctagacgtcggccagaggttgcgcacagcggacgacataatggagcatcgttcaaaagctagatgagggcccaccggtggcaggagggagtagggcaagggagccgggcggctctcgaaggggcgaagaaatggagaagcgaaaaacgaaagacagccagaggggggcggtgcagaagaagtccgattagtctcaggggccggtagccgagccgccgccagccgacgtccccttcttcttatatttgaggatccacgggtgccgcgcgacctctgtcagcggcaggcgcttggccgggtccttttgtaacagctgagagttgggtcgagtggcgtggtcagcagtcggctcgttgcgaaggtgacgacggttgcgggaggcacgtacccggacgatgaggtcctttgcctccttcgagacggtgtctggcacgtgcaggtcgacgctggcgatccgcttgtacgtctctacgagacgagcgccaaaggggagggtcgcagcaggaggtcgtcagcccagcaggacatcgagagggcactcaacagacgacggcaacgcaccccggtgaccggccatgtcctcgaacggtggcacgccgcacaagaactcgtacgcgagaacgccaagcgcccagtggtcgaccttctcattgtgctccttgccctcgaccatttcgggcgggaggtagtcgagcgtgccacagagcgtcgtccgccggttgccgggcgcgtggaccgaccagccaaagtcgccaatcttgagctcgccgtcgatcccgagcaggaggttctcgggcttgatgtcgcggtggatgacgtgcttccggtgaaggtactggagggcgtcggccatctgcgcaatgtactgtggcgggcgcggacaaagggcacggtcagggttggcgagagaggagctccagggccggccaaggaagacgcacgcgggacgagcgcttttccgaaaaggagcgcagcttcgagagctgcttgtagagctcgcccttaccggcaaactcgagcatgagaaagatgcgcttctcgtcgtggaagaagccgtagaggcggaggatgttgggatgcctggtcggtcgcatcgagcctgcccgtcagctcggcgtcaaagcacaaggggttgatgaaccaacggacctaaggttgctctggatctcaatctcgcgccgaacctgcttctcaaccttgctcgtgacgagctcctccttgtacatgcacttgagtgcgacaatgtagtgcggcgcgatctttgtccgggcgaggtagacgcggccaaacttgcccttgccgagcggccggccgatctcgaactgagggagcgaccatgcgtggtagggccgcaagctagcagcgagggtagaaaagccagagcttgtcagcagggatggacgctcggcgaacgaagaggggcctgttgcgaggaggaacgcacccgttcatctgcgacgccgccggctcgggctggtgggcggcagcgggggcgtcctgctggtcctgctcgctctgccttcccttgccggccgccacactcgcaggagccgtgctctcacgtttccgctcgtccgcctcaaagccgccgtcgtatgtgccaatatcgatgcggtcgagcccgcgcgaggcggcctgctgggcgctcgtcgccaggctgctgcttgcgacccggaggtgcgttgcgtgcgccggcccgtgcaggccctgggccgtatggtgggtcgacggccgatgagcggccgacgatgacgacgaagtcgcagacgtcggtccggccgctgacctgggcgagcctgactgaccgccgggtgggcgggacagcgactgcttgtggctcgccggggcggcgttcgaggcgcggccggcagggaggtcggaggcgttgatcggtgcgttgagcgcgagcttcgagagcggcagccggatcgtcgacggattggcgctcgacatccggagcgctctagcaagtagaagaaagagggagagagggatgtatgacggtgcgagccgaggttgactgatgcggcgccgcctgcgcccctgccttggcgcgacgcgtcttcggagcgcgactgctttttatttctctcgtcaaccccggcagggcggcagagtgagagtccatgagatttcgtcagagtgtgagagacagagcgcagggcagacagacaagagggagaggaaggtcgcaggatgggaggcgaaatcaaaagaaagcggaagagcaacggggggggggtcgttcacttggccgggatgagctggccgttgtcaatggcgacgctcttggtcgcgttgctcgtcttgtagatgccgacgagccggtgcgagagctcaaacatgtcggaccggagcgagatgatgataaactgggccgactttgtccgctcgcggatatagttggcgatgatgctgacgttgcggaagtcgagcgcggcgtcaatctcgtccataaagtagagcggcgtcggctgcaggaatgagagaaggggtgatcagtctcggcgagcttcagggaggagggaggccggccgcaccttgtagacgtggagtgcaaagacgagcgcgagcgaactgagcgtcttctcgccgcccgagaggttcgaaatgttcttccaagacttctttggcggcatgacgctgaatatgatgccttcggaaaacggatcgaggctgtcgacgagctcgagctcggccaagccgccgagcgtgatgagctgcggtcggccgcaggggtaggaagcaatcagcggcgactcgaccgccgtcgctcggtacagccgtcccggaacgcacctggtacatctctttgagcttggacgagatggcattgaagccggccataaactcaaagtgccgcgtctgccggaggtcgtcgtagcgcgtcttgccggcgtcgcgctcggccgttaccttgtcaaggtcggcctggcggtcgtcgaactccgcctggcggcgccggaactcttgcaggaccgacatgttgggcttggacttgagcacgcgctctgaatgaaagaacgcgagggtcagccgaatgtagtagaaaaacagggaggctgccctcctacgcaccctccaggttggcgacgtcggccttcaggatgttgacgtcgagctcctcgagctcgtcgtcgctaaagatctcgagctcctgattggccgatcggggcttgggtgccgtcgctgccggagcctcctcctttgccacggccgtgtcgtcggtcgtcggcttgtcgatgtccatgccctcggcaggcgactgctcgggggcaacctccttcggcggctcgtcatcgtcatcctcactacaacggtagcagacggtgtcagcaaggggcgctcgagcaaaatgacaggcttgagtgcacaagcaagccaatacgcactccacatattgcagctcgagctcggcatgccgctcggtccagtgcgcgtgccggttgcgcgagtccttcagcgtcttggtgttgtcgtcaatcttttgcttgaggtcgagctgtcgaggagcacagacggcaagcgggtgtcagcgcagagaagggttggtcagccgaccgaaggcaaaccgcagcgcacctcacgcgccttgaaggcgttgagggcgcccgacttttcgtcgagctcctcctttacggccgacagctcctcctcgagcgcctccatgccgtcgcgtgcctcgtcgacggtcgcgcggacgagccgcatgtcctcgacgcagaccgcgagctgcttgtcgagctcctcgagctgctcgtcaaggtcttcgagcttggccgtgttggtttggatcgctttggccagcttttcggcctcctttgacgacttggtctgctcgacttcggccttgttcaccttctcggacgagagctcaatctgctgcttgatgccgtcgaccttggacttttgcgcccgcagcttgacgccgccgacctcgaggatctggtcctggagcgccttgatggcgtcctcgatgccagacgacttttgccggagcgactgggcctccttcgtctgggatgaaatctccttgtcgagcgaccggatgcgcttctcgtcgtcggcattcggcttgttttgcgacctgcgcaagataacggagagctttgtcagcgagagagaaaagagaccttgcgcgggtcagggcacgcactggagctccagcagacgcttttcggcctctgcgacccgcttcctgccgttcttgacgtcgagctcaatcttggtgatggcaagctcgacctcggggatccgctgccggatctcggcgaccgctttctgggccgtcgacttctcggcgaggaacgaacggaggtcttgctgggcggcgtccgactccttctcgtaccgcgcaatcacctgcggctcgactcgatcagacgcgaacttggagctcatcccgccgcgctggacacgcgtgccaccgcccgacatggcgcccgaggtgtcgatgagctcgccgctgagcgtgacgacgcgccagcgctgcttgccataagcgatccggtttgcttgctcaagatccttggcgacgagggtctgcccgaccgccttgaaaaaggcgggcgcgagccgggcgtccatcggcttgatcaggtcaaacagccggggaacaccctctggcgtgtcgcgcggtccgaggtccttgttgccgagcttggtgaggacaaagatgctcgcccggccgcctgtccggcgcaggtgctcgatgacggcctggccttgctcgatcgtgtcggtcacgagggcgttgagactgccgccacaggccgtcgtcacggcgacgtcgtacttgtcgtcaatgacgccaagatcgccaaggcgaccctgggatggttgggaaagagaggcggtcagtatacgaggcgaccagtgtcagtcgctgcgccaggcgacgcacatagaagccatcgaggcggcccatctcctgtagcttcttgaggcccaagagcatggcgtcttcgcccttgccggccgcaagcgacgctttcgcatcctcgacacggtcgcgcaggccagatgcctgctgacggacactgctctccttggcgttgaggctctgcgagcagcgcggaagagttagcctcgtcagcaatgtcatccgagcagatccgcgcaaacggtgtaacccacggccagggacttctccgacgagacgagctgcttctggagggtcaccttctcctcttgaagctctttcagggactcttcctgagaagttccgaggggcgacgcagtccggcagcgtcagcatcggcgcacaaacccgggcaccaaagccgaacgcaccttgtcctgcccgccggctgcgagcgtctcaagcgcctctttggcctcggtgacggcttcagaggcgccgctagctcgcttctcgagaagcgtccgctcgctgtgggcaacgtcgatggcggcctgccgctcgctgatcttctcggtccatggctcgagctccgtttggtggacctcgatctggttcgagaacgcggccgttttgtctgcgattgagcatcaccggtcagtctgatgtgttcgcctgaaccgacgcgcaagaggagcccgtcacgaacccttgagcccgtcgcggatgtcctcaaactgctcctcctcggccgcaagcttgctctcgagcttgccgagctcggctcgcgtcttgtcaatcgtctcgccgtggttctcgacccacgagagcgccgacgaccgggcgtggccgtcctcggtgacagccttcttgagcttcttttgctggccagcgacgtgcttcttcttctcgtggagctggacctccttcttctcctggccggcgagctccttcataatcttgtccgtattcgacttgacttcctggtagacggcattctgctcgtcaaacgacgcctggagctcctcgatctcggccaggttgccccggttcgaggcgacctcggcgtcaagctcggtcttaaagcgttcctgtgagacgagccggccgagggtcaggtgggcagccctgagagaaggccaaggacggcagacgtacgaggttctgtgcgacaatggcgatgttcgagttgagctgaaaaaggtagtactggtagagggccgactgccggcgcgcgagctcgttctgatcgcgcaggtagtcctcggcctccttcttgcggccctggtagtgtcaaggtcgaggcccgtcagtcgatggaggtcgaggaagcccaatcgctggacgcaccttcagagcgttgagctcgcggacgacgatgccgagccggcccttcttctcgcccatgatctcgttgagggcgtcgacctggacgagtgcctcttcgatcgccgtcttgtacttggacgtcccgatgatgtcctcgaggtattcgagcaggccctcctcgtgctccgtctgggccttaggcttcatttgcgcgatcgactcgacctcgccctgaccatgcgagcggcaaggagacatcagtacgggagtccgccaagaagggagaggcagtccaatgagcgcacctggaggatcaggaaccgcttgtgcgtcaggtcgatgccgcggtccttgaggagcgtcgtcgcctcggtgtagctgctcgtccggccgttgatcgtgtacttggacttgttgtccttgtacgccgtgcgggcgacaatcagcgacgagttcgggacgacctcgaacgcgtccggtcccggctgcgcacaagtccagagaggagagggtcagccgaccgccgccggttcgtcagaggagcaatggcgcgtggaccgaccagatcgataatctccttgaaccaaacctcgacgttgcagtactcgaggtccggccaatcctccgagttgtgaatcagctccgagagcttgccctgtcgcatctgctttgccttgaagccaaagacaaagaggagggcgtcgatcgtgttggacttgcccgagccgttgggtccgacgatggccgagaacgactgcaagggggagcgaggtgagccttctctcctgttgccgctaatgctagagaacaaagcatcagaccgaccttgtggaacgggccgatgacttggcggccggcgtagctcttgaagttctcgagcaccatcttctcgatgatgagccgcttttgtggacccttcggcggctccggtactgagactgccgcagccttgggcgtcactcgaggcggcttgggaatgaatcggttggcggccggtgtcggcgggacggcggccgctggcggacgaggtgaggcggcgttggccgcagctggagcagggctggcaagaggcttgacgttgtcctcggcctcgctgacgaggtggtcgtcgttgtcgtcctcatcgtcctcgacctcctcctcgacagcagccgacggggcggcgtcatccgagtggtccaagagcgagtcggcgaccgacggtcgggcagccttccggctgttgaccttcgccggcttcggcggctcctcctcctccgactcatcctcgtcaatgagcgagtcgccctctccttcagcctctgcctctggctcctccctttcctcgtcgtcgtcgccgtcgtcgttctcctcctcggatgactcgacgacgacacgcttgcggccagctcgtcggacgggcggcggcgaagcgacgctcgaagcggccggcgatgatggggcagccgacgaagccgtttgccggcgagacgagcgacgaggagcgaccatgctgggaggtcctaaggccttccctcggatgcgtgagagggagagagaggaaggcagagaggttgtcgttggcggtcgagagcagcccagccgaacgacgccggcgggacgcgtcgcgctcgcccgcgcgcgcagaggcgaaagaaagcaacctggctcgagttcgagagcagggcgacgagctcatagatcggcatgaaagacagccttccagactgctaaggtcgtatgcgtaggcctctcacaaagcacgaggctcacagcgatgtgggatagtcgtgagcggggtcgagacggacgactcgccctactcgcggtcggcttcgcgcagctgccggcgggacggatgtaagccagccgaccttgctgcctggccccgactgctgcccatcaagagcatgctcgcctcgagtctgcgacagtcagtctcagcgggttttgagaagccaggctttcgagggtggggtgagcggggcggcgcaccttgagccagacgacgacgaggttccaaaagccaaggacgccgagctcacccgggcttaaaccgccgagcgccttactcgccgttagggccggcgcgtagatgtaatggagaaggagctccatcgtcaggagcgagatgactaagcggagggcgtaggcgagggtcgttcggggtgcgaggggcggaggtgcggccatctgcggtgtttgaggagggcggtcagcgacgtcgtgcgacgagggctgtaaaagggttcgcacctgcgccgcaaagttgttgaatgtcacgatcgggccagcgacgtagagcggcgtgtagagcgcgtgggcgagacagcccatgaccgagctgtactcggctagaggacggggcgtgcggacgcgcgatggcggcgaagcaatgggcaggttgacgggcggcgacgcgagatcgggggaaaagcttgctgaagggctgtcgttggatccgtgcccgatcggcatgaaagggacagccgagccgtctgatggcgagactgcgctgctgccggcgctagcggcggtccgcgcccagtggtgatcgagcgcgaacgagaggagtcggagggcagtgatgttgaacgagacgtgccagcgtgggaggaggccagcgtgccgctcctaacaaacgaggacgagcatcaatggagagcggcatcagtagtgagcggctgatgtcaggagccgggtgtgagccgaacgcacgagcgcctccggcaagagccccctgaagccctcggtcttctcggtcccaacgagcgcgaggccgacaaacacccaggcggcccagacggcatgcctccctccggcgagctggcgcgagagcgcgtggttgacgaggaccaggccgacgactttgagcgcgttgcagccgtgcatgacgcccagcgcagcgagggcgaagagcgtgtggaaggcgttgagcgcgtgcggggaagggctgcgcgaggaggtagaggaggagaatagggctaagaggtgagggagagagtgtcggagggcgagctgggcggaaccgaggccgagcagggagggcaggttggagcggaaggagttgtactgcggatcggaaagatcctgcagatggtcgaagcctgtcagctcttcctgcgacgcgagcggcagacagggtgcaggatacggaccaccgcccggccaaggatccagcccggtcggagccggtgggcaaactggccataattcgggtggcctgccaatgcagacaagcggcaaggcgtaagctcgacccatccttcgtcgcaagttgctgagccagctcaccaggcccaaagctcgcgcccgtccaggccatgatgagcacaccggcgagtaccgtaagctcatatactcggaattcggccgttcgccagcgagcgagccgggtccgaccagagctgccggcgctagtcgatgtcgtcgtcggtgacagggtcgaggacaagggtccgctgctgctgccgccgcctggcaagggtggacctggcgagaactgagctgctgctgaagagggcgtccggaccgtcagatctggcaggacgaaagccggtagctggccgagcgagggcaggcgcatggcggaggagatgatggtcgacagcctgtcgacagggaggcggcgcagcccgaccctccgtccggcggcgggcgggcgacttgcatgtgcgagtttggcctagcccctccgcctcgcgagccagcaagagctccgaccgaccgacgaccgatatccctgactctctccctcactctcgccatgtttgccctccttcgctcggcggctgccggtcctgtccgccggtcaccaccgactgcagtcttcaaggcggctgcctcgttcagctcgacgcccacggcaggagcgacggcgagcagcgagcccgagctcctcactgtcgactcgacctcggaagccccgtcgtcgtcttcgtcgtcgagctcgactgccctggcatcgatgtccggctcgacggccctggcgatccccgaagagttcctcgatccgtcgacgggcctcatgctgcccccggcgctcctgccgaggcagcctttgcccgagaagctccagcgcaagcggccggagcggatcgcgcgcgacgtcaaggaggaggtcgagcgcgaccacccgctctgggccttcttccggcgcgacgccgagggcgaggtcaagacgatcgagcggtacggcaaggacgagaagatgaccatctacagcggtccgtcgagctccatccaaccccgctcgctggcgcaagcccgaagctgacctcttgcccacgcacgcaggccggccgttcgaggcgtccgagctccggctcaagtcgtttgacgagctacatacgctctggtttctactcctccgcgagcgaaacatttactacacccagctcgccgaggccgcccggcggggcgtccacaagcggatcattcagaagctcggcacgcaggcccaccggcagaaggtgcgagcccgacctcagtcccattcggtcctcatcattcacgcccgcttacaatgcttctcgcttgctgtcgcgctggccgacccatccagatccagacgggcatggcccggatcaagtacgtcctctctgaacggtccaacggctacgccgccgtcgaggccgaggccgtctcgctccgggcgctccgggagcagatcgaaagcacgcccgacgacgtcttcgcaggcgacgactttgggttcgaggccgacatcaaagctggccggcagttggccgagccaaagcaggtgcgcgagctccgcgcaaagctccggcagggtacgggccggcacggccgggtcaaccacgagcggcgggcgaggctaccgcggcgcggcgatgaggaggaggcgtttacgcggcgcgtcaaggggggcaagggggaggcgaaggagtttgtccgacagcagacggccgagtgagggagcaaagggggctcctgctgcaggggaacaggtgctgctcatgctatgcgcttttgcctcctgatctgcgacccgccgaaagcgccacgagtgaacagaagcagaagcatgctagaaacggcccctagcccgcccgacggccgccgatgtacaggattccactgctcatgtcgatggacctctgctcatttcggctagactgtagtcagagtcgctaagctcccgctccgactccgactcgctccattcgctctcgctctcgtcgctctcatctggatgagcggcgacgatcatcgtcagcgcacgcgggagcagagaaagggggactctgcaggtgggctcaccgaggtcgaggattgcgggcacccaatcgtcgttgaccggctggccgccagcggtctcaacgtggacgccgaccgagcgaagccgacgcgcgactgcacagatctgggcgacatactcgctggcgctcagccggcggaaaaagttgcagacgtcttctgcggcgcgctcgtcgaggaggatgatgcaacgcaaggctgggaaggacgtcgatccagttgtcgccgacagcatgtcgtatgccgcttcgaggcaggaggccacgcccgaggcgcacggatcctcgtcgccgtcgagattaagcgcgagcgtcgtcaagccggcgtggcggccttcgagcgctgtgggaacaaggtcaagcggaagcttgaggtaccggagctgtgggagttgagcaaacgggagagcgtgctccagcgctgggccagagaggccgagggacagcgaggtcaagcgagtgtgccggccgacgtactcgcagaagcgcgcgaggtgcttgtcgttcaggccgccgacggaaagctcgtccagatcggccgagacctcctcgagaaggaggaatatgttgaaggagtggtggtagtcgactgaaaggacgcggaggcgggagaggtcgaggactgagcagagccggagccgcagcccctgcgccgtgccgctggtcgtagacagggcctcgtcactccgcttcacgtacatgcggagctcggtcaggataggccggccgatggtctcggacgaaggcgcgcacatgtctgacggcgcttcgaatccgacgagctctcgcgagttcggcatcagggcgagcgagcggaggaaggtctcctcctggacgccgttcagcgactggccggcctcgatccgctcaatcagctggccgacgagcggcgccgtctcgagcttccgcaagaggtcgaacgcgtacatgtcgatggaccggtagatgagcttctgcccttcggcctgtgcatgagaggggattggtcgtcagcgtcaagcttgtcgggaagcagaagcgggacgcagacgcaccctccaggcccgcgagacgaggcagcactcggccagggcacgccaccgccgctcctgccagttccagagcaagccgccttcgtccgagtccttcaacgagctccagagctcgcggaggatcttggcttgtagttcgaccggcagctttggcaggtgctgggcgtcgagggatggtcgaggaggggtgagctccatgtcagcctctgggcttgcttcgcgaaagaggcggcaggttgcagttcagctcgagcgcctatccaaacatacgagcggcgaagcgtccatctcgtccagacagggaggatgctgggtaagtactggcaggcctagagacggtggtggttggcagacgacaggcgtcgacctcgactcgacgacgacggcacgttcgacgcgcagcagactcgtctgtcttcggctccagccatattgcccccccttgcctcgtcgctgccttctggccttgaccctctgatgggtctgctctcgtgcaatcgtgctccagactgccaatttaaaggtcaattatgtcgaccagcgctgcttagagaacggcgggctcgaacggcgatccaggccgagcgttcctccgcgagagatctcacggttcgatcggttcgcaggagagaaacaaccatgcaagcagcagggagggaagtgagagggaagtgatcaggggagagtgagcgcgtgcgccagcatttggcgaggcgatgagtcgcaggcggccgcgacgctggaagggtgaacgagtggaagcttgtcagccgacacctcttcgacgctgagtttcagaatggcccgcccaccttacgacgtcgccgcgatatcctctagcacgtgtcctcgagctcaacgcccacagtaagcagctctttggcggccttcttgacggctttccggtaagaggcgcgctctcctcgctcggcctcgccggtgcgcaacaggcggagagcagggaagcgtttctgggcgctgacttgggcgaggtagacctctaccctcccagagaagcgagtatttcctcgtccgagatcccgtaatccggggaggttgcaaagatgtcgagcgtcgacacggcgagcatgctgctgcgggcggcgaggaccgagcgtgagagtcctggagtgatagaaagggtcttgagtcccgagaggagctcaagagggatgatctcgtgaggagggtcggctgccgtatcatcaagccagaccgagagatcttcgagcgcgccgaatcgctcgatctgctggcggcacgccgaaagaggcgactcgtagagacacgcaaaatggaggctcctgagcccagcgttgaccgggccgaacattgcggataggcgatatcagggtcttcgaatcgatgctgacgatgagctctgagaggcgcgacccaaggttgaagatggtcgacaaggggacgtccgagttcgacccgccgctcttgagcttgacgcgaagcctcaccaaggctggccgaatatcgggcttgccaggagagggagatagaccgtttgacggccaggcaatgccatagtaggtgcgaaggtttgggaacaaggctggatgtgggccgactggctccgtagacgaccggtccaggatggtgtcgacgagacggccaagtttcggaaagcgttcgagcttctccgccatacgctgggacgtggtcgcttgactgtcaatgtgcaaaattccgaacaggagtcgctgacctacgtcctgcgaggccagacgagtggttgtcctttgtcagtggctcggaggtgctgcgaacgagcgacgacgagaactcacagcccaagccttgctgacgaggcaaactccgagaatcagcgtcgtttcttcaggctaggaaaatcactcttgatgatgtcccagaggtgtccgaggatctccatctgaagctcgatgggtagcttccgctgctgctggatgacctgacaggggtcgagcacgagaaggctagaagtcagccgctgagcacggacgtctgctcgagcacccggaagtatcacaccgggacctacggatcgagatgagttgctcatgctgtctgctgcgtctttggcggctcgctcgagtgggaggctgctgcaaggaggtgagggtcatagggttcagccgttgactcgagacaaggacggacgacgcgacgcgacgcacggctctcctcccgacagtgaccctgaaccgaccgacctcgctagccgctacacttcttcccttcccagccgcacgtaagatggatccggcgacctcgaactcgacgccgggcgcaggtccgtcgcttgtccgtcctgcagggccgccagcaggccttcttgtcgctggcttgccgctgctggcccaggcatcaccgtcgacgagcgtcgtttcgtctgccgtccagccaacggcttcgacctcggcagcagcagctcccgcgccgagaccgcctctcccgcatgcgggctcctctggtccgggaccacccaaaatcagctctggcccgccgtcgaacggcctcgtcgccaacacggccggcccttcgaccgctcctcaacgacctccgcgacctctgcctgaggcgcccgacccgcagaagcagagcggcccgatagacgaggccaagctcatcagcgagggcgtccggctccggtacgttcgcgtctgtcagctcggttgctgctggcctagccccggcgcctgactcgatacacctctcgacgtcgccagcgtcttcttgacgctcgctcaggaccaccttgcgacgatcaagcccgacgtgacggccttccgcgaccaccaagacgttcttgagcggctggtaccttaccatctctggcagatccccgaagatgacctgcacggcccgctcggcgcgccctcgcgcaagggcaagggtcgcgcacgcgactgggacgaggccgaggccaatgctgcagagcgcagaggtccgttcggcctgtcctaggtgctgatcatcagtgttactgatccttgccatccactctgtctttcgagcagcgcttcaggaagccattggtttcgcgaagcgcaagggaaagcttgatgagcgctttgcacagttgcgccagcgagaaggcctcgtatgtcgctctgaacgctctacactcccctaagcatttagctgacatttagccgcatctgtgctctcagcacgcctcgccttcaggcatggtcatcgcgctcggccgcgagctcgtcaatgacgagctgccggccatcgtcaagacgcggtcagaagccgtccaggcgcggcacaagcagacgatccttgaggcacaaattgagcagattcgcaatccagctcccgtgctggtgccttcgcagccgccccatcctccgcggctgcctgtaccgttagccagtgcgccgtacggcgtcaggccggggccggcttcgacgggcccaccctatcaaccgcagcagggctacccgagcacgcccatctaccggcctgcgcctggaggcggaacctaccagccgtctcggccactgctcaccggcacgccgacatcgacagtccaagctcggccgccaggctaccggccacccacgacagcgacactggccgggacgtcgacgcctgcttcgagatcctcgacgtcgggtccgcacgcagctgctggcgccggcctttcagcagcgacgcattccgtccgtcctccaacgtctgcgctacggccacctgcgcccgccgcaggctcaggcgctccggcagccgatcctccagccaagacgatcaacgtccacgccccgcattcgctttcagtgccgatcgccttcttgtcaaacctgcagacggccggcatcctgcccaacccaacggggaggcctccccagccagggctagcaaccgacgtcctcattgaccgcgacaacgtccgcttcaccgtcgtcctctctgcgctcactaccgaacggatcaagacgctgagcgaggttctcagccttgcccatggcgccgaagcaaagaagcgggctgccgcagcggctagcactggcactgcctgaaaaagccacgccgacctcgccgaccggatgatcatgtcgcgctctttttcacgctaacttgctaggagtatcgtcgctcgctcccgatgcgcgaccttgtcttgttgagagggcgggcaagtgcagttgaggcaaagacacatgggcagcagcgggtcgtcctcagactgacgcggccgtttcgaccttggcctcaacccatgatcctcgacccctcaccgcctcctaagcccaccatgtctgccgcccacagtgcctcgaccaaggaccgtgtactcatcgcctgtatcggagacgaggtgcgttttaagtagccggtcgaagggcgggcggctcgagcctagctgctgctgtcctcggcctgaccgcgagatggaaccaatcccttgccgatcactccgccctttacaggactcgataacaggcctcctcctcgccggtatcggcaacgtcgacaagggcaagaagaactttctgatcgttgatgccagtgcgtgggcggtcagccgtcgagcttcggctcagctcgcagcggacagcatcgctgacgagcgacgccctccgacgcctgtcgcatctgcccctgctcttccctcgctctctcagagacgcagccggcaacgatagaggcatctttccaggactttacgacgcgcggagacattgccattctcctcatcaaccagcacgtacgtcccagctcccgccggtgagctcgtacggcggtggctcctatcgttccgggggaagcgaccctgcatcaccggctgatctctctttgccccctccaggtcgccgacaagatccgaccgacagtcgacaagtacagtcaagcgttccctgccctgctcgagatcccttcgtgcgtctctgccctgctcagcgcgcgcgcgagcccgaccacgccgcgagagatccgctgacgctgaccgacgctcactcttcttgcaacgccgctcgtagaaagacgcacccgtacgacccggagaaggacagtgtgctcaaacgtgtccgcaagctggccggcgacgactagacgggcccagactcaggcccgagatgaacggcggccgcgcgggaggccgcaccaggcgcagcaggcgagtgccgagcaatgacctttacgaccccttccctcttctttgctcttgctctcagctggggccggccccagtacgtacgggagcgagggtcgcatgttggtctcgaccgaggcaaatgttgcgaccttcggcggtagcacctgtatcgttcccgaccccttcgaccgcacgccgacacctgccagacgcgctctgtacctacttcagtctctgccaagctgcctctctgtgcccatgagctgcttgaaaacgcacccggagcccatatcagggcctttgctgcctggctcggcgccgtcaccgatcttgtcggcggctggcggtccctcacatttcatcgctccgtccgaagggccgcgttcagcccaccggcagtcggcttgtccgcttgctgctttctcgaaccatcattacctcgtccctcctttgccttcatcgaccgcgacccgaagcttctctcgatgtcgaccttccctgggctcgtgcagccaaagcggaaacgcaacccgaaggccctccagctgtcggccgaggcgctgtcgccgcgctcgggctcgttcgcagacgacaagccggcaccggtcctcgatgtcgagaacccgtcggcagctcagccgcccgccggtcgagacgacccttcagcaagcagctcgacagcagctgctccagctgccggcccatcgactggcggcgctctgagcggaacgacgacggcgagcaagatcagccgcaagaagccggccgggctcgacatctcgcggtcgatcccgacgcgacctgcaccgaccccgtcggcctcatcgacgccgacagaccgcatcaagcggtcgtctgggcaggcaggagcgacgtcgtcgtcgtcctcacgctcgagaacggcgtcgggctcaaacgcggctggcgacaagccctcgcgggcatcgtaccagcagaagctgacggaccagctcgcgagcctgcacctcggcggcgagagcggcaagacgaccgtcgctctccggcccgaggatctcaaggtcgtcggcgagctcggctgtggcaacggcggaacggtcaccaaggcccttcacggcccgagcgggctctttatggctcggaaggtgcgtgtccctcgcctcgatgttgctgcacgccacaactgacaccctgtcgtcaacccctcgccctcagctcgtcctgattgacgccaagccgaccgtcaggaagcagatcctacgcgagctgcagatcatgcacgactgctcgtccgaccgcatcgtctcgttctacggcgcctttctcagcgaccctcacatctgcatctgcatggagcacatggacaaggggtgcgccggtcgttcttcccgcattctgcaggtccggtaggctgacccagactgtgaccctctttcaggagcctcgacaacatctaccgcgagcacggcgcgctcgacgtcccgatcgtcggtgcgatcgcgcgtagcgtcctccagggcctgacgtacctgtacgacgctcaccggattatccatcgcggtccgtacctggccgttgttcaacgttggaagaagtcagcaggcactgactccttgcacccgacgaaagacgtcaagccgagtaacattctcgtcaactcgcagggccaggtcaagctctgcgactttggcgtctcaggcgagctcatcaactcgatcgccaacacgtttgtcggcacaagcacgtacatgagcgtgcgtttggttgagcccagcatttatccataagccgctaggctgacgcctcgtccttgccttgtcgtagcccgagcggattcaaggcgctcagtacacggtcaagagcgacgtttggagcttgggcatctcgctcatcgagctcgtcctcggccgcttccccttctcaggtgcgctgcgtcgcagtcagcgtcgaactgcgactcgtcgctgacgctgccctcgcgcctcgcaccttgcagattcagactctgacgcggacgagccggctggaaatgaccggcaggcgacgccgacctcccgctcggacaagcgcaagtcaaagggcgtctcgctcggcggcggcggcatgactatgtcaattctcgacctcctccagcacatcgtcaacgagcccgcgccgcggctgccgagcccttacggggccgcgacgaaggagggccgcttcgtcgacgactgcctgaggaaggacccggcagagcggctcagcccagcagagctcttggtgcgtaatcgcgggacgacattcgaccgcttgaggccgctgctgctaaccgctcgtcctcgctcctttcaggactcgtcctggatggtcgagattggccgccagtcgatcgacctcaagacctgggcagcagccctccaatgatcgacgttccagcctcccttcgcctctccttccacgacctttcatttctgcttgtacatcagcccaccccgtccttgctccgagcacgacgcacccccacgatctcgtcctcgtgctcgctgccatgcaccggatcgggccatcttaaaagaggacgaaccgcgagtggggagggcgatctcttgcttctcacctcgtcctgcccgcttcatcctcgtctctgcctgccaacccctgtccctccgtcaacccgccctcgcgcctccccctttgcctcctgcgattgatcagtcaacatggagcaccacgaacgcgtcgctcctgtcgtcaagggctcagccctgctcttcatggcgttcagcgccctcggtgcgtcctgcccagcgtcgagcccgacgaagtcagccgattgactgacgccccggccacctcatctctcccatctcttccctccgccccttcgtcctgcccgttctctcccgcgacaggcatcatctactctgacatcggcacgtcgccgctttacgtcctcaacggagtctttcccgctgcgaagccggcaccctctccaggtaacggcgccctctctgccttcgagcgttaggcgtgagctgactgtcgctctcgaatttgctcctgcagaggacacgctgggcgtcatctctgccatcatatgggccataaccctgtgcgtcctcgtcgccagcctgccgccgacgtcatctcgacctagcgctgacgagctcggtcctgccctccatgctttccaggctgcctcttatcaagtacgcctgcatcgcattgcactttggcacggatcagggtctgttgctctccgttctgcttcaatctagagacgctctgctgactctaatcttcatcggcttgccgcaggcgagggcggatgcttcgcgctcttcatcggcctcttcccgcgctcgcaagagtcaagcgacggtcgggccctcacgcacttttctaccggcgattcggatagcaccggccgctccaaggccggccaggagcggaccggctacgcaacgatgaagcgagcaaagtggccgctgatggttgtggtgcgccccgtcgaggacgacagccgtcggccgtcttgaacaagcgctgaagccgcttcccattctgcaggccttcttcggtgcaggcctgaccatggccgacggtatcttgacgccagccgtctcgatcacctcgtgcgtgtcctaccgattccttgctgcctgtcgccgtgtcctccagctgagccggccgtcggcgccaaccttcgtttccttcagcgccgtcggaggcctcgccgtcgcccagccatccgtcatcaaccaggtcgtgcccatctcgatcggcttcctcgccttcatcttcctcatccagcgctttggcgctcaccgtatctcgatcggctacgcgccctgctgcgccatctggatggtcctgctcggcgcgaccggcgcttacaacatctcggtccacccggccgtctttcgcgcctgcgacccgagccgggccgttatgtactttatccggaccggcaactacgatgccatggcaggcatggtcctggccttgaccggcgccgagggtgcgctccgtcttgcccttcgcagccctgggctaggctgatccgacctggtctcctcaggtatgatggccaacatgggctccttcaacgcggtacgtcctgcacttctggtggcctgcatctctctgctggggctcactccgtctcctcgacattcgtcagccgtcaatccgcctcggcttcatcttcgtctacgtcaacctgatcctcgcctacctcggtacgtttggtcgagcctgacctctggcagccgctcgaagcaggaccagctgctgaaccctctggcttccgcaggccagggcgctaagctgatgaccgagcccgagcgcgtcgtcgcaaacattttttacgaggccatcccgggcgctcggaacggcccgctcttctgggtcgtctggtgagctccggacctcgcattgcactcatcgttctgcaaccccaagctaacgccgcctgtgacacccctcgcagggtctttggcttgctcgcaactgtccgtcttcgcctgtcgccgctcgagcgccgcgcacagctgaccctgatcctgtctctctctagatcattgcctcgcagacgatgatcactgcgaccttctcgctcgtcgagcagctcatctcgttcaaggccttcccgaccttccgcaagacgcagacgtccgagaagttccaggggcagagtgaggccggccggctgagctttaagaggctgatccgagctgatacgcccttgttcctctcgctcagtctacttccctgtgagtctctttgagatcgtccctgctccccagcctgactgacaactccttcaatcggtccgcaggccatcaactacctcctcatgatcgcaacgctggccgtcgtcgccgccttccagacgtcggccaacctgaccaacgcctatggctttgccggtgcgtgtgcccaacatcctgcgcgccgcctcgcagccgactgactgacggcgcacttttagtctcgaccgtcatgctgtgcacgacgctgctgctcacgcttcagatgccgttcgtcaagaatgtcccttggcctgttgcgattgccttcttcctctttttcggcttcatcgatggtgagcgccgtccagcagcgctgctcatgtagcacgatcactgacgctcacgccccgatcccgcaggcgccttcttcggtgccaacctccgcaaggtccctcacggcgcctggttcccgctcggcgtcggctgcctacttgtcgctctcatgagcttctacacttggggccgagggctcgaggacgcctttgacgagcgcaaacgcacccggctctcgtcgatcatcttccgccgctcggccgtccacgaaaagaagcacgtcgcctttgagccggtgcctgacgaggtctcggccgcggccgcttcgaccgaggactcgcagtccgaggagccgatcgagctcacaaagactctgacgactcacacgccaaacgagatccgctacgccgaggtccacggccagcactcgcgccaggagcggccgacgatctctgtcgacgaggacctctgtacgtgtctgtcgcccttcacccgctgaaacaaggagctgaccggctgtcgagcctgcctaccagtcctggcggtccctactggctacctcgacctgccgcgggtcaaaacactcgccgtcttccatgagcaggcttcaaactcgcacgggtgcgtcctcagcccgcgcgtcgaggttctaccgctacccttggctgaccttctggtccatccgccagagttccgcacgcattctacgccgcgctcagtcgctggcccgctctacctcgggtcgtcgtgcgctcctccctcgtgcctgaagctcgagaccgcccgctgaattctttcttgccaaccgcctccagatcttctgctcgacgcgcatcgctggcatcccgcacgtcgccctcgaggaccgctacagcgtcagccgcgtacgctcgctcgagggtttctacggcgtcatcgtctcggccggctaccgtgacgcgccgttcgacatcgtcagcgagctcctgccaaggatcacccacctcgagcgcgtcgccaacccagagtttgccgagacgcgcatcgtcgagatcgagagtgctgcacggaacgccacccacatccagccgaactacgtcctgcgctcgatgccggtcccgttccggccctggcgctggctgcgccgcgtcctcatcgaggagctctatggccgtctccggtcagtcttctgcgctcagcagcatccgccaagcgactgacgtctccttccttcacgacagggtcattttcccggatgagaccggcgaggaggcagacgacgtgacgatccacatcggcgtcgtcgcccacatctaaacctcgctccgcttccgtcccctcctgctcgtcgacgaccctctcctgccttgacgatcttgatggctgttttccacctgactgctggggcgagagaggaggaggagcggcaggtcagctctgcttgctccttggtctacgagtcatcaacggcgccgatacccgaacgcgtcgcgtcgcgtcgccaccggcgagcttcagcttgtacgcgtcacaacacgcatccggaggaagctggcattcctggcagcacgcacctgatcgattgaggtcgagtatccaggcgggaggagcggtattgcggcggaaggggggtggagagggcctcttgccggagttcgcgtcgtgcgtccgcgcaggcgacggtggccacttgaatttcgtcggccggtcctggccgccaaggaggagcaacaatcgcacggcggtagatggtccagggagacagcgttcggtcgtaaaataggtcttcgagatcgtgtgtaccaggacggcccatcgcccctttccctccacccaacacccagcctcatctgtttcgcccccaggcacgggccctactccatggccggcgtctctgcagagaattctgacactgcagcctcgccggtagagtcaggaccaagcgatacaggcgcctcctgtgagcctactgaagccggaaacgggagtgacttccgccgttgcggctggtgcgacccgggcgagatcgtctggtcgccttcgacctcgtcatcgctgctgtcgctcgaggatgacgaggacgaggacgattcggagagtgatacgtcggtcggttcgagcccgccgccgtcggtgggtcctcgctgcgactgcttgggcgtcgcctcctcgaagaaggacgacgtgctggggtcgcgccgggtcaaccgagggctcaggagtgcttcaacctcttgctcgagcaggtcgtcggctgcaccgaagagggaggctgcccggctctctgacggaagtgacgtcgtgatcgcctttggcgtgcttgggcccgacgcggcgggcgttccggtcgtcgacggaccgcttgacggcggtagagatgggagcgaggtcaagacgctcccggcctctttgagcttgcgttcgtcatcgtcctcgagatatgggtcgggcgaggccaagagcacctgggcgatgacctggtcgtcagccttggccccgagcgtcaccgtggatgccagctcggcgcggagaacggtgccggtccgagagagtactgtcgaccagagcatctgctctgcatcaagcacctgtcaaattcgcccgccgccgtcagtagagattacttggtgcacgcccagccgcaggcgtcacgcacctcatcgcagtagtcgcccttgacccgctcgagctcgtcaatctgctcctggaggacgcgcagcgtctccttgagcatgccgagatctcgaccgaccccgccgcctccggctgagcccttcttggcgctgctcgctgctcgactcagcggcggtcgcaggtgaccttcctcggtttcgcggatcttcttggtccggatggcgagcgcctgcgagtaggcggccgaccgctcggccgacgcggcatggtagctatcgcgcgtctcgagcagcggaatctcgaacgtcttgtacaagcggtctgccacgacgcgctcggtcgacgcgagtacgtagtggaagccggcagcggcctggaggcccggacccgagtggtcggcgcccttgaccctgagggagacggcagcgagccatcccgcgcgcgagcaaacgatggcagaagagacatgcagctcgtcagctgggaccgcgaaacaatctgatgccccggtcaagcggatgacgaagccgcacctcgagcagctgtcgagcgcgccggcgagggccgcgctggccttggccttggccatgcacgccaaacggaagtcctttgccgcgccgagcaggccgtcatgcgcgtcgaggctggctgtaatatctgctcgagagagaaagcgtcgatgcgggaccgtcgagctgccagcctgagtgtcttgagaggggcccgacgacggccgggtcgaggagcaccggctgcagtgcgaggaggtcgaggacgcgccggacgagaaggacgatgacagcggcggccgggcactgatgtcggcgtcgacggcggcggaggcggcggcggccgtgggagagctggaagatgacatggatgagagaggcgttgctcgtccgccgagaatgctgtcgatgggaagggagcggctcggagacaggaggcggcggacgcgtcgggccgaaggcagtcacgctcgattggcgatacttcaagcggcgattgctgcgcgagttggaatccaagccggaatgcgtcgcaattgagctccgccaaccacgaacgacgaccctggctttcgaggtcaccaggccggcctctctctcaaacccccactgctcgtccttcctcagtaaagctactcagcacgatggcgtccacaacggcaggctctgatgacgagaacgagatgggcgacgacattgctgtcgactaccgtctgctcgccaaactgtcagtctcacctggctcgagcctctgcctccgccacctgcgcctcccttgggctgacctcccccggtctttcatctgcagcggcaagaagaaggacaaggacggtcagattgtcatccctaagcgaggcgagaaggactttgagccgctcgagaagggcgccaacgtccaggagcgcgccctccgcgaaggccgcgaggccatgttcggcgcccttgagggcctccgaggcggtaacttgtacgtcgccccgcgctgtgccattcgagaagaggagaatatgacgagctgacgagctgagcgttctggccgtctcagcaagacaatctcgcacgcctggctacaacagccgctatcgccggcgacgacgatgacctccgcgctggcgagcgcgctaccgaccctgctcatcatgcggggcactcactttacgactctctcacacacgcttcgcttggctccgtcgtcgccaccaacagacggcacacccccgcctcgaccctcgacggttctcctgcccgaggaggtcctccacctgctctcgcgcggctcgctcgtcctctacgcatcctcggcaccgccgccgacgctcgatctctctccgcaggcgccgacggtcgagcatcagctgctcgcacccgagcactctgcgcgcaagatgactgtccaggaggcggccgcgctctgggctgccgaggtcggcggcggccgctgggaggtttacgtcgggctgaaacggatgggctacgtcgtccagcgggcgcccaagttcctgccaaaggagcttcgcccggcgacggccgtcggcagggccggaccgaacgtctcactgcggtccaacagctcatggctgggcgcagtgtggggcggcctgcgaggcgttttcggtcgcctttgggccgcctggtccggcatcgtgtcaagcgcctcgcgcctgctagtcggtctcttgccttcgcgagctggcacgacatctatagctccccgatcggcctccccgtcaagagacgcggacgacaaggagtggacgacgctcctttcgcagcgcagtgtcctaccagacaagaagtggtcctacagtgcgtgaagcgcacggcgctgtcgcaaggctttcctcgctgaccttctttccatgccgatagcacgaattttcagcaagctgcggatcatccctaattcagcctcgccttcggctgttgccgcgcctccatccgacgagccctcgacaggcccgccgccggtcgagatctactttcatgtctggaagccggcgtccaactacaagaagtcgaacccgcctccgcccgacttctacgtttcggtagtcgagtgcgttcttgagcttctactttgggatgctctccgagtcaactgatatccgtgccgcctcgccgctcactcaccagtgcccgcgagttgcccttgccgtcggtcgacgagctcatggccatgctcgagcagacgcccgacttgcccgagcctccagcacgaggcgcacccgccgccgccgctcctgctgcaccgtcgcctgctcccctgccctcaacaccagcccgccgctcgtggcggtcctgcctgcccttcctgtcatccgctgactcttccaacaccggctcggtgccgccgtcggttgacgaggagagcacgccgcctcgcggtgcgggccgcaacccgatgccgtacctgaagcagggcgaccgcaatgtcgttgtcgccgtcgtcaaggacggcggcgtcagctggatgcgcttcggccgtggcgtctttggccaaatggcaatccaatgaggggctcctctgattcgacacagggcgtgaagaaagagacagcgcgtgggtacaaggtcaagcaggcgtcagggggtcacagaaaggagaaggagtgcgaggctgtcgagcgtcggtagcatgagcctagcgggtgttcagctttgagagagtccgagagagtccgaggggacagtcgtctcagcatgacccgaggtgcgcctcgaaggtagaactcacacgtttcgcgtttcgccgacactttcaaacgccgggctccctcgccgctgtcgtcctcggctcccactgcgagacgcttcgcggctcgggccgtactcgtgtggatagccgtcgaccgttcggccttcgcaactcgccgggagatgagggcgagcacgctctcgtgctggcgccgggcgcgttcgagcgactcgagctgggtgaagacgttgttaggcctgcgtcgggcaaggatgacacgtgtcggtcagtcacaacttatcaaggaccattggcggcgaggcttttcacagcggccgacgtccacgtccatctgggtcattagctcggccagctcgcgaacaatctccttgacggctgccatgtcgatctgagcgcgtgcgagcctcgtcaaatgatgaggtttcagcggtaggacgaaggagatgcaagttggcgtctgagtcagtctttcgccttgctcatgcctcggcgggcgcatcgacagaaggcgacagaggagtcgctccagacgtacttgatctggagggcggcctcccgcttcgccgcacgcttggcctgcttgcgcgccgcgcgctccgactcggcaagcctgaaggacatcaggccgtcgatgagatcgcaggatgtcagcggggtcgacgaggaggcaggagatgctcgaggcgaaaggggttcaacgctctcggtggcagcgacagaccatcgggacgcacatttcgagcagccggaggacgacatcgttcgacgccggctttgtctcctgaccttcatccgtctgagctgtcggcacggggttgaacggcgttgactggagggcggcgtcgtcgtgcgtcacctgctggccctcggcctcgccaccgggcagcgacggacggaccccttccgcagcgccgacctctgcgcccttgtcgtcgccttcagcaaccgcccgctccgtcccgttgtcgtcgaaagcaggctccgtcgcctcctggtcgtcttcatggcaaccagcatcggccgccttggcgtcgaggttggcggccgtacggccgactgatccggccttgtcggcagcggcggcggcggcgtcgggccggtcgatcacctgcagctcgtccgacgagaccgacgatgaggagcaggagaaggctaggcgggctgtgttggccatgactgggactgggagtcaaaggaggttcaggaagggagtgagggttcgaggagaggcggcgaacgagcgaggggcgtgacataaaggggctcgagctccagccggtcccgtcgtgtgctcgcccactttgcccctacgacactgtcggggcctgcactgtgctgctcgaccccttcagcaggcctcgtcgactgagaagaatcgtccgcgccgtcagccaggcggccatcacgttgaggagcttattcgaggtcaccattggccctccctcccgcctatgctcagcactcggtcagcacttctgacagcgagtcgaggcgacgaactcataccagacagtcgagcggaagtaaaaaaaggtgggagtgaaggggaaaacgaggcgaggagcccgagcaggcaggaggtccgcgcatggtgttggggttgggagggaagctaaggacgcgtggcagcgggggagctgggtgggcgggcaggcaaaagcgggagttgttcgacgaggcgaggcaagcggcgggcaaggggcgagagaaggagagggattactcgtcggcgggcttgtcagcggcagccggggcggcggcggccggggcctcctcctccttgggctcggccttggcgtcgttctcctgcatgtccgaagtccagagggtgaggttgtcgcggaggagctgcataatgagcgtcgagtccttgtacgactcctcgctcagcgtgtcgagctcggcgatggcctcgtcgaacgcctgcttggcgaggtggcaagcgcgatccgctgcgaagaggggagaaggtcaggctcgcgcaaccaagaagaagggaaagacggccggagacgcacgcgagttgagaatctcgtagtagaagaccgagaagttgagggccaggccgaggcggatggggtgcgtcggcgggagctcggtgacggcaacgtccgaggcggccttgtaggcctcgagcgacttgttagaggagtcggaccgcttgtcgccagtggcgaactcggcgaggtaccggtggtagtctcccatcctgaaagggacgacagaacggggtcagccaaagagctcggccggccgacgggactagagcagagacgcacatcttgtggtagaagaccttggactcgcccgaggcggccgagggaatgaggtgcttgtcgaggacctggtaaaagaagggctgatcagcgggaggaccgggacgagcgcgaagggacggcaacgtacctcgaggatgtcctcgcagatcttagcgagctcggcctcgatcttctcgcggtagcccttgatcatcgtgacctgggcctcgttgcccttgctctcctccttctgctcgatcgacgagacgatccgccacgacgcccgccgggcgccaatgacattcttgtaggcgaccgagagcaggttgcgctcctcgacggtgagctcctggtcggacgaggcgacgcgcttcatgttctcgaccatctctgcgagagacgaggcgcagaggtagcgggcgatagaagcagaggcgagagcagggcgatgttgtcagtagctggaaagcacgacgcgcgtagagcggacggcggacgcaccctcgtagcgctcagcctgctcggcgagcttggcgaggtagaccgagtcctcccgggattcagacatctggagagaggagacagcgtcaagaccgatgcgtacggagggcgacgtgcaaacgacagggtggaagcagaagatgggaagccctgcggttcgccggccgcggaaggcaaaaaaagaaaacagtggcccgaacgagatggacaagaagagcttgccgggcaagcctctctcgacaccaatccggtcgcctcgccaggacgggcgcgctctgctggaaggccaggcagcgctgatctggcgcccgagcgtctgaacgagggccgggggctgggtgacggcggcgtcgcgcgctcggacgcctccgaggtccagctcgcgccctcgcccgtcgccgcaagctctgttgaccgcgcccgtgacgccaatgcgcgaggaaaagacgatgagaggagggcagactcactgcaaagggtagaaaagtggggtgttgggttgggaagggttgagggcggctggagcgtgataaggcaggcgggcgagagggaggtgaaaagagagttccggcgtcagcgcgctgtcctttgcttcgacggtggttgggcgaagagctcgacgggcgagagagaggagggatggcgaggggaggagcgaggcagccggctgagtcggctgcgagacgtgagggatgaaggggaggcccaggccgggcaagggcagggcgagggggccactttgccttcaccgcaacccccccccccgtttcacccgctgctcagtcccccagcagctcgacgcagcacacacgaccgccctctccctttctcgactgccactcgcaaggcaagagccctcccttcaagctatcctggacaataagaaggtgagcgaccatcgtgctgatattctgtcgcccgtcatcgacaaagccgatttatcaatggcgaccagcagcggcgcgcctctggagccgacccgagcttagcagcacaagcccctctcaaccgcttccctcttgacgaccgtcggaccttcgcctgaccccgcgcattcccgggtacttccagctgaaggccgtcccgaagacgattgggaggctcccaaagccaagctgaagccgcaggctaagagcaaacagccgccggccgggcaaggagccagcgctgcgagcttggacggtccgagcttctgcgctcagtcactcgagcgacagaagcaagcccggcgcgcacactcgtcagagcagaagcggccgtccgagaaggtcttgtgcgtctgctgccgtcttggcgtgccatatctctcagggctttgactgaccgactgtctactcggtggcccatgctgcggtcgctcttaattcgcgcgcagtcgtgcgcaccatcttcccccccacatggtccctggactcggagctcaactgacagcccaacctctgctccctgtccaaagtcgcaccggtcgatgtcttgatccgcgaggcgcggctccaggctagcagccagtctgttggatcatcgccggccgatacgacgtctcgctacgccgtcattgcgacgcggcacgtctcgaccgcgccggttgaggcgctcaagcggatcgaagccaagtcgcactccgtccgcaagattcactcggtcagccccctcccctttgtagcgatttttggataacatcggctgatacggccatttgaactaacggcagggccgcttcctcctgcttcgtgcggtcacggcgcccgggcgggacacgacgccagcctcattcatcgggtgcggcccgttgctctcttcccattcagctctggtgattctaatggcctatttgccgtctcctccagtcaaactctgcgcggggtagccgtccagatcgacctgcagtgcctcccttggaccctcatcgcgtctggtcccgagctggcggcgagtctgctctcggttcgatcttgctcatcaaggaaccgaacgtcgtggagatcgaaggacgcccggtcgtacgtcttccttccggaccctctgccccggatcgatcttgttgacgccactcttggctgcccaaccaggtcaacgtcgactcgccgacggacgtcctgctactcgatgcagacaaccttgccggccttcagctggcaggagcctgtgatccaggagccgccaaatattgcttcggcggaccagcaccggctgatgggcaacgccgagctcgccagtcgctggctcctgccggccgaacggtcgtacaccatcggcctaaagctcgagccagagtacctcggcctcagactcaaccgtgcgctcgtccggctgaagctgggcctgtttcgcgccgctcgggccgacgccgaggccgtgctcgctctcggccggacgactctgatcgggccgcatctggagaaagctctttaccgtgttggctcggcgctctactgaattcagctctggtcgaacgccgagagccatcttaatgatctcgtcgcgactggatccgatgaaggcaagaacgggtcgagcggcgctagcgcgaggcggtcttgggcgcgtacgactggagctcgctctacaacgcgtcgcacaccaaccccgacgtcaaccttgccgactatgtctcctcggctttcattgtcggcaacgtttgcggtcgaggccgtcgtgtgaccgctcagagagacgttgcggccggcgagcttccgctgatggtcaagcccgtcgcctcggtctacgagacgccgcccggcttggatctcctgacgctcaacttggccgcaggcaacatccactggccgtcgagaacgcatctgacgcagcgtctggctatgcggtaagctcgtcccagacgtggcttccgcggctctccttgctgactcctgctgccctctctttcagcctcctggcaacccctcgctctaccactcttccagccgctcacgaaaggttttggcttccctgcctcgagcgccctctcaatcagcgacttctcccccaaggccgacatcagcgacgcgatgccggtcggcgcgctcagcatgtcttttatcgagctcatctacactcgccgcaccatgaaccagtcgaggatgggtcctgcgctcctttccagcaaagacgacctgaccggctcctcgtcctcctacctcaagcttccggccggcctccatttcctttcatccctcttcaggcactcgtgcgaccccaacacatcaatcgctcctcctgtattcccttgcatggcgcccgctgctgatggcacctgatgcgcgatcagctacacgggtctgctggaagacgcgcgtttcgtccgcgccctgcggctgatcaggaagggcgacgaagctcagttcagtcggtcgtagccctcgcgtcgcccagaccgaccttaagcctcaatcttcctctttctagtgagcatctcggcttagaagtgttcagaataccggatccggaccagtctgctcggtccatcgactttagccagcccgtgcgcttgcaagtctgccgcgaggactacaaggaccaccccgaggcagaggaccagcgccgcatgcgtctggcaagctcccagggagtctcaaacgacgactctcatcgcgcgcattgccgaaggcgactcgctcgacgaaaaggtcatgtaccaggtgcgtcccgcccccacctgggtgtcgctcggtccgggcggtggcaatactgatcccgccgaccgacacaggtggcggccttccgcctgcgcgagattgagaagacgtacgccgacgaccatgcaatcgagtaccggcacgagatgcaggccccctaccaagcccttgccgttcgtctctccttcgaattggcaactctcccccatcttgagctgaactccattccctcctgttgatgcaggagctctgctggctgatcctaatcttccagcctcgcctattcgaccggcccaagtgggctgagcgcatactcgcgtgggaacgggccgccctgcgcagctgcggcgtcgtcgaggatgccgccagtcggacctttagtgcgccgcgggccgcgcacgagccctgtgtcggcttgcccctggcgatggcaggggcccacaaggtcgtcgggtaacgcaagccgcgaagaactggctgggcagaagcagatctggccaaaagggtcgcgctcctggctggcgaccgggcggccaacctcgcgcgctcaaaagcactcctcgccgaggccgaggcgctcgaccggacgctcatcggtagcggacggaagctctgattcacgcgctacgccgacacctttgcgagatacgtcctcaagatgggtccgtctcgcttcgcttcgcctcgcttcgccccccccccctccaaagcagagaaccgcgacggacgctgactcgatctgagcccctctcagacgacctgctttgagcgcaccttctttcagatccttgccattccttacgacccttcatgccccgcccacctcccctgccgtacctatgtcagcgctcgttgattttgcgagcagcctgacgcaagagacagaggggaacgatcgtcatgcagggtgcgcagagcaggccggcatggacctgcctcggctaggtcgggaggcgcagatggccagctgggaaggcagaatggaagagagcgagcaagggaagatgacaggcgaccgtcgatgatgatgacgagaagcagggatacaggcggacaggggtataggcacagcgtcgagagaaaccgcggagcagggctggaaggttgcaatgagctcggctcccagcactgccgtccgtgcctttgcggccaagatgcgcaaaatgagacgggcaacaggagagacaggtcgatcgaaaagcgccttctagatgttgccgcgctcgtgcggattgatcttgggccgcttaatgcccgtcttctcgggccgagcaacaccacccttgtccctggaggtggggcgagcgcggaagcacgattgggcgtcacgggtcgaagggcggagccgatgaagaagggcagacagagccggtcagctctgattcaagtgggctgcgagtcaagaagagcctcgagccaaggagggaaagcacatacttggccgccttctcggtcgcctcctggccggtcgacccgccctgggtggcgggcttcatgatcgacagcttaccagccgacgcggccgagaccatctggcgctcgatcgagttgttaatcttggccgacatgctctgaagagcaaaaggcgtggagcgtcagtcgtgtgctgggccaggtcgagctagacgaggccaagcggccagcagggctcgctcgtgccaagagtcaggtcggagccaggaacgccgctttcgacctcgcctgacctttcgcagccaacccaaaagacctccagcccgtgcccctcgtgacgcctggcgacagcttgctcgcctggctgaggaaaggacgcaccttctgaagcgagcgcgagacgacggcgctgtgcttcttgggcgcgatagaccgggcgcccttcttggggttagtcgcgagcttggacttgcggcctccggcgccggcacctccgccgcctgactttgcgttctgggccatcgtgtcgagggtagggaggaaggagtgggcgttgaaggggttgtggaggttgggtcggcgcagccgctgcaggttcgagctctcgctcctccgaagaaaagcctccgatcctcggagaccccgcagtcgaatgaagatcaagacgctgcccttcagtcgtcgacctgaagctgaggagaggccggacagaatgctgagcactaggtcgtcctgcctgaacgaggtacgaaggcgtgccggctttgccacgtgagctcaatcttggcgccgtcgtccttgtcgtcgcggcgcgcggtcgccaaaaggcacgcgtgcctcgagcagcagcagcagcaggcgccctctggcagggacactttcgatctgggctggacagccagaaagcagacagtagatctgagagagtagacgagggcttgttgcagtagggagcatcgtcggcactcgcagctggtgggctcggcggatcgctcgtccggtcattgagcacgacggcgcccgacgccatcggctcccctctcgccgttgctctcgacgccctccctctcgctcttcttccatcccaaccttcatcagaaccgaccgtcttcgcccgccatggacgacgacatgacagacgacactccccgctggacgccgatccacgcggccgagcccatgtgggggctgcccgagcacagccaggagcccgagcagagcaggatgctgtcagtccactctccccctgcccctccgcccctttcatacagcgtgcggccgagggccgtcaccgtcaccctctcgtcctcgctagaaggacatactcctctcttgatccgcctcggctctgttcagcccttgtacacctcgtgagcgaggctcgtcgagcggtgctggtgcctggcgagggtgacgttatccgggcggacaacgctcgagcaccgaccccggccttgtactcggcacaagcagccgcacctccctttcttcttcgcttgcctatttcgcccacgctgccgctccgatcatgcttcggctttttcaccgcctcttctgtcctcgccgttatcgcgctcgtccagatactgatcgtatgcgccaacctgccctccttcggatccgtcgtctcggccgagcagagacctcgtcttcattcaggacgcgaccgggtcgatggtctgtcccccttccaacctgctttgtcatcagtctcgtcggcatctcgttgctgacagctgctgctttctggctctttacctcgtctggcgccggcgtccgacgcgtcagggctcctacatgttcgtttctgcctggccaactcacttccgacaattacacagcaactgaccggctgtctgatcttgatctcaatcgctctctcgaacagcaactctggtctgtcccgctctctcgtctctctcggctgctgcagccggcactcctggctacgagcggcctcgtgcgcccgaaccctgcagaccactgacgatcgcacctttccacaacgccatatcatccggccatcttgacatgcgcagcaaccaagaacattgaggaggtcagtcttcttggtggcgtgcgacttgggccctgggcgcagcgctctggcattgctcgcgctcgtgctgacacgacaccaccttcgcccaacagatctgcagcgccatcatcagctcggagaagctcacgcgagaggacgatctgcgcgtctcggttcgtccttctgtctctttgctgcttcgaccgccgtgcacgaccctggcacacaggccttaaccgtcacgcctgccctttgataacccgcacatacacagatcatcagctaccgcgatcacccgcctcaggaccactcctacgtcgtccggacgaacgagttcacgagctcgattccgatcgtccgccagcagcttgcaaacctgtgcgttcttcctctcgagccgctcacaggacttctcgagctcgagctgactctctgctggccttgccgtcgaacgcaggtacgcatctggcggcggtgacgggcccgaagcggtgactgcggccttgcacgcgagtctgtcgctcgcctggcggcctaacgcggccaagatggtcgtcctctgcgccgacgccccgccgcatggcatcggcgaatagtgagtgctgtcagcggctggtctccagcaatcggcggtcgctgatcaccttgcgtttgtctctcagcggcgatggcttcccacaaggcagcccagatggacacgatccgctccggatcgtgcgcgagatggcttcccagggcatcacccttttgtgcgtctcgttcgagggatcgacgccctgagctgttcgctgacatgcccttgacattctcttggaagcatcatcgcttgtgagccggcattgtcgggctacctgtacggtgtcgacctgttctcagcgctctgtgcgtcacgcatgctgctgctctcctcgcgcgatcggatcgacgctgaccccttactgctcctggaacgcaggcaaaatctcgggcggtctgatgcttccgctgacgacggccaacctcctcgcgcacgccatcgtcagtcctgctcgcctctctctctcttggctttgactgctgctgactgtccctctcttgttgcaggtcggctcggcgctagagcacctcgacatggatcggctgatccgcgaggtcggcgaccaggttgctggccggctccgtgccggcgagggctcggtcgatgacattgcgcgcgagcttcacgagaagctgatgctccgaggcgaagaaggtcggagtctgcggatcgagaacatctgtccgttccgcttgcacctagtagacgagcgcccgccgatgactgacccctctcttgcgacctccggtcagaccgcgacagcgaggagtcatccaataatgtcgaagcgttcgttcaggcgccagacattgcctcggccaagccgctgctgaagaaggtgcgtctctgtcgctctctccatcatcgtccttgcttctgacgcttctcgtcacaggtcaagggcacgcgcttcactgaaaagtacctcgcctcgcgcctgtcgtcgcatccggcacggtcgggctataagccggcgctgcctgcccgacctggagcctcgaccggtatcacggccgtcacctcggtctcgaccggcccgatcgcttcaacctcgttcctcagcggctcgagctcgagtactacgttcggcagcagcagcagcacgacggccggcccgagtggctcgcgtcgcgtcctgagcgacttcaagccattcggcgccccagcagcggcaacggccggtgtttttggctcgcccgctggcggcggaagcttcacaggcggcggctttcaaccgcgtgataccggcagcgcacgaggcggcggtcgctacggcggcggacgtggcggcggcatggactcggacgaggacgatgacgacgacaatgtccaggcagcgcgggcggccgtcgtccgaaacgcgaccgacggcggcatggacgctgacgaggccgacgccgccagctttggccaaggggtcgcgttcgaaaagggtgcggtgacgctcgagcaggtccgtctttcttccgtctgccctccctctacacgacgactgacgcttctcgccctttctcgcaggcccggcggatagcgatgggcgcggcgtggcggtcgagaggatgaaggccagcccgcccggcctgattgcatgcaccgttgccagagcgacagcgcgcctccaagctgcagtcaggcgcacgtttgtgtgaccgtgaagcatgcgatcgagataggctagggcaagacagtaagagggtccttgtccggttgagagagacggcggaaggcaagaaaaggagcgtgcaggagatcaggagaggcgagagagaatggatacattcaaaaagggagggtggagggagggagattgaggggtgagggagggaggttgagggcgcgtctagttgtggctctcgagcgtccagtcggcgatcgcgatgctgggcggggtgacaaaggtcgttccgtcgtcccactgggggttgaagaggacctggagtgagtaggtgccgccggggaggtcgatgacgagaacggtcgtgttgaggttctcctggtcggcaacctcctgctcgccgtcaaacgtcggctgctggggcagggccgggtcggtcgagtagcggacaggctcggcagtcgagaagcgggcgccggcggccgcgcccgtgttgacgagcgagacctcgcacgtctttccgccgagcgtgagcgtcgccgacgtcccgtcggacccgacggtgatcgtcgcgttcgtgtgcatccgccactggacgttgtccgcgttgggtgcggtaatctcgtcctgaatcaggatctgcttgcgctggttgagcgtccggatgccacgccggacggtcgaggccgagccgccgtaggcgcccgtcatgtccatcgagtagaaggcggtcgactgcgagttgagcgtcatgacggtcgagtcggacccggtgtcgttcgaggtgccgaactgggtcgagggctcgacgttgacgacctggttctcgcggttgataagaatcgtgttctggccctcagtccgcttccgatagtagagccagcggtcggcgtcctgcgtctcgctcgagaagtagtcggccgagaggtagttgcccgagccgagctcgccggcccagcgctggccgagggcgtcaatgacgaaagtgccggcgtcaatgtcgccgtgcgcctggtggcccgtcatgttgccggccttggcggcgacatagaggccgtcattgtcggtccacgacgaccggatcgaggcccagtcgctcgacgggttggaaaagtgccggtcgagcggcaggccgttccaccaggcgccggtgacggctgggtcgtagtagaagacgccaaagggctccgaggcgtcgatgtggtcgcgctggtagagcgtgtagcgcggctcgtcgtaggccgagcccatgtagatcatcgagttggcgttggctgagtacttgttgggcccgtggtcgccatagttgaagagcgaggtcatgccggtgacgtaaatgtggtaaaggccggtcaggtggaagtctgggttggccgtcgcgaggccttggtcggtgccgtacgcgctgacgagcgccgccgactgctcggcaaagccagtcgtgccaaagtacctgtcaggagagcagagtaagggaggggtcagcgaaggagggaggcactagctcgatcggacggtgggcggcgcaccagtagttgggcgtctcggtccaggtgccgtcgtcgtagacagccgtcgcgcagttgccctttgcgttggtgaccgagttgtcgatgacacgctgggcgatgccggtcgtgtcctcgtcgacgatggcgagcgcgccgaccgtgcagccggcgttgcagacgcagttccagttaccgttgacggccgtccaccacgagtaggcgccggccgacgaggcgccggtaagggcggcgtcgcagtagttgaggccgtattcgatgatggcctggcggagcgttgacttcttgtcgtcatcaaaggcgtcatagaaccagtcataggcgatgccaaacgcggacgtgagctcggcgaggtcgaggaagtgggcggcgttccagcgggtcgggctgacgccaaacggcacgtccgggttgttgcccatcgcagtctggccaggaggcggcggcgcgagaggcagaggggtcagcggcgggcagcctgcgcgacaaagcggggaaacggcgacgcacgttaagctcagtccaggcccgatcggcccagcgggtgtcgctcgacatcttgtaggcgtaggcccaattcttgattcggagcttgatctcgcgggccgggtcgaggatgcccgagcccgtcaggccgccgtcctcggtatagggctgcggcggcatgtcgtagttggccgaggcgttggcgaagatggtcgcattccacgacgcgaggtacgggtcgttggcaatcaggctcgtcaggccatcccacttgtacttgggggcaatcagacgcgggtgggcgcggatgctgctcgtcgacggcgcctcgttgtcggccggccaggcgtggtcggcccggctcgactcggtcggggcggcgtagagcgcagagttggtctgcagcaggcgggcgaagaggcggaggtcagcaggcgagcgaacacaatcgagtgcacgccaggtcgcaccgaggtcgggtaaacgggcaggaggtaggtgtcggtgccgacggcgatgcgggcgaggcccttggcggcagctgagctagcggcggccgtgcctgggtcggtcgcggtcgagatgcgggtgttggacgagccaccgccagcagcggccgatccgcccgtcgaggccgacgacgagttgtcgttgtccttggccgcgcgcgagccgaggacgccgccgaggacggcgccgaggatgatggcgagcaggagcagcggcaggccgacccagagccacttgttcttcttcttcttctgcggcggcgcgtagccatagtcgccggtgcctgccagaaagagataagcaggcgtcagctcgggtgagattctctctctgatgagccgtcggcctccgtctcgttcgctccctcctcccgccaatgccgagcctccgccggcggtgacaaaccgcccggcaggctggccaccgcctgagcagcccctccggacgagcagaaccggtcgccataggcagcacgacttcagcagaggctgctcctcgttctcgagtgcggccttgctcccggcggctccttctccacctggacggacgaacgcgccacgtcgcgcgtctgctcgcgaaaagcaacgagggaaggaacgcacctccgtcgccaccgcggatgcgggacggctctgggtacgtcttctcgtagccggcaccgccgccgccgtaaggcgcctgctggtagctgcctccgagctcgtgggtcgagccgtcaaacgacggctgctggcggtaggtcgccatcaggggaaagggcggagagaggggcttgttgaccggcggggagccccggtcccccccaacgcctgccagctcttctagcatccagatcggcttttctcctcctcaccttcggcaagccctcgcctgcatggcctccccttcccgcctgctctttgctcagagctcgcgaccacgctttagcacccgcctgccaccgccgccccggccttcgaccgcagcagcccagaggcgcaagggccggacgccggtcgtccttctcgcaacgtcggccacggccggcggcctctacctctatgatcgcgaatgccaggcctcggctgccgtgcgctcgatacggacgctctggaccggcctgcttatcacgctcgactgtccgtcgatctagcgtccctttgctgcaaggctcggcgagctgaccctcgcctgtcctccttcccgatcccaatagtcaagcttaacttcagcccgaccaaggccggcggcatttcggagcttcactcgcggacggccaagcggatccaggacctgatcaacgccaacaacggcctctacatcaagcttggccagcagctgggtgcgttcgcagtagcgggtcacgcgccgccgccgccggactgacactgaagcggcgctatgacaggcacacaggccgccgtcctgcctggtccttaccgcgaggccttctcctccttctccgactcggcgccttccgtgcccttcgaggacatcctccccatctttgccgcctcattcaacggcgcccaccccgacgacatctttgacgactttgaacggacaccgctagcgagcgcttccatcgcccaggtccatcgggcgaagctcaaggacggcaccgaggtcgccgtcaaggtccaaaaacccgagatccaactccaggtcgagtgggatcttcgcagttaccgcacgtgcatgtggctcatgcaggcgagttcgctcttgctcgtcctcgtctactgcgccgttgctgaccaggctggaccctgcagatattctttgactatccgacttatttgtgcgtcttccgttgcgctgccctcaccgtcgctcgctgacaggtccttcccctcccgcaccccgcagcgtcgcaagctgttcgtcgcgcttaccttgcgaatctttgccaatcagtagatctgacctcagctgctgtctctcacagacgtgtcggagcagatgcgccgcgagaccgatttcaacatcgagagtgcgtccagcggcacagacgctgcgcttgcgttcgacctgaccccctagccattcctcccttcgccagccgacaacgcccgcaagacgatcgagaagttaaaggagacgccctcgctgaaggacgacgtctacgttccgatcgtctacccagagtttagcaccgaccgcatcatcacgatggagtacgtcaagggcgtgcgcatcaacgacgtggacgctctcgccaagttccgcttcaagggcggcttccgcggcatcatggatacggtcctcgacctctttgccgtccagatctttgagtggcgctgggtgcgttgcctggtcagcgtgagcgaccttctgagcgtgggctgacacccccttcttcgccccgccaggtgcactgcgaccctcacgtaagccgtcaatctcgatgctgaaccgccggctagcccaagctgacccttttcgttgcagccgggaaacatcctcgtccggcccaacccgaaaaacaagcgcaaaagccagattgtccttctcgaccacggcctctgtgcgtgccagcgctcaaacagctgtcggcgccgcggctaacgctcttcctcttctgccttcagacatcccgctttctgagcaattccgccggcagtactcgacgctctggcggtcaatctttgtgctcgacctgcccgcgatcggcaacattgcccgcgagtggggcatcgattttgataccgacctctttgcgaggtgagcgtttggccgccgtgctctccctcttcggcgcacctctttcgctgacgtgtcgtcggtcgacagtgcgatcctcctgcgcccgacccggctcggcgctggccggagcaaggagcgcaacgaggagattctcaagcgcgagtcgatgagcgagtacgagctccagatggacatcaagcggcgcatgcggctcatgctcgagaacgaggagaaggtgtgtctgctgctttccgctccctcttgtccgttttgcttgatgttgacgcaacgactcaccgctcggctcagattccccgggagctcatcttccttgtccgggcccagcggatgctccaggttgagaatcagatcctcaactcgccgtcaaacagagtgcacatcaccgccaaggtgaggctgcctgctcattcaggattttgacagcgctccccgctgatcgatcctcccctgctcctcatccagtgggccgcccgaggctacgccctgtcgcagccgacgcacgaccgatcgatctttgcggtcggcctccggccctggcttgccgcccagcgcgaggtcctgacgttcaagtttgcgctcgcgctcatcgacctcggcttctacacggtcaagctgtcggcctgggtcaagtcgctctttggcatcaaggacgaagggctcgaggctatcttaaaccggcaattcaattcgcttgccaaggaggagcttggcgtcgacctcgaggaggctcagacctttgaaggctgagtcccttcattttgcctgtagagacgttgtagattttgcgcatagatggtagttcctgtattggcgggcgggcgtcgaaagttcagctccgagggccggtcctgagggcctacccggcggagacagcgcgatgtcgtgtttgcaagcatgaagaccttgcgagctgggtgcctcgcagcgagcctttgaagaggcgacgagaagtgactggtacaaggggacgcccgcgcgcacgaactcttgcgcgcgcgcgcgcggagagagcttgactctttcctcgccgggagctcaggcggaggcgtcctgacctcgatccgcaacctcgtcgcctccctcagcccagcctcagtcgagctcagaacggtcgcaagctcggtcaccacataccccgttccagcaggcagactccttagactcctctccgagcgacccgtccgtcgagcgctcgccacccacctcggctgccccctcgaccccgaccctcttcccccctcgttccaacatggccttcctcgcctcggcatctggcgccgcctcgtcgtctcggacagccgtccagacggtctgcagcgtctcgaaccgcgcccggtcgacctcgacgatgggtctctcgcgcaaggctgtcaactcggtcaagaagccagcttcaaagcagccaaagcggcgggacgagattaaggagccctggtacttcaactacgcctcgaggctcgccgtcctgcccgagggcagactcgacacggtacgtcctgcctttgagccggacctgctctgagtgtcagactcttaggctgacctttctgctgccgtcgccgccggccgcctggccgcctcgcagaaacgcatgtcggctctggtcaacctctaccactcgacctcgtcgcacgtcactcgcgagaacctcgacgcctacatcgacgccgagtttgcgccagagtcgggcgtgccccggactcggccgcagatggcctcgctgatcgacctccacatcgagatgaacgaccccggcttctactcccggcccgagaacgactggcagcggatcaaggccgagacggcgctcgcgcttggctcggccgccgacggcatcgacaacgccttccgaagccttgccggcacgccgctcgccaatgcgctgccgccttcggccacggatcaggctgcgctcaatgagcggacgaatgactgggtcggcgcccgcgagcgcgagctcacgccccgccagcggctcgtcgtcgaggctctctacggcgccgacgtctcgcgccggccgggcctcgagagcattagcgagcgtatccgagccgagtcggagctcgacagccggtcccgggccgaggccgtcgcgggccagaaggctgccctctccgacgctggcgacgccgtcctggcgctcgacagcaacatcccgctcgagccccatgtcggcccagaggaggaggccctgacggtcgaggaagacccggtggcggccgagggtgtcgccgaaggcggcgatgtcgctccccaggacattctgaccaaggagggcgagtccaagccgtgagacggcagatcgcatgcacgccgaacgaagtcgatgcgatccagctgagtatgggcaagatacagtacacaaggtcatggatgcgtgggagggtcgagtcgtcctctcccagcgacggtcctcgggcctcctcccgggtcacctcccacccgcagcgagaagcttgttgatcagctgagcgccgttgccatgtgcttcgccagcgacagtgctgtccttgagttcggcgtggtctgtcagacagagcaaagaccggcgagagggcttagcttctgctccgtgtccttgcgcgtgcaggaccagacagcgcaggacgcactgtcgagccaggcggccgagctcaggcttggtgtgttgtagagcatgagaacggcgtagccagcgtaggtgcagaggacgagcatcatcgaccatgccggcagcaagatggcccactcgctaccgtgcgagagaatgaggagaacgagtgtcagcacgagctcagacgtgcctggcctggggtacggcgtcgaagcgaggggtaggactgcaccggtttggaaaccaagagatacccatcgcgtgcagggccgcctctggcaggaaagcccagaggagataggcgaccccgacgacctgggaggcccagcagacgagatgagcgcaagatcagctctcggctgctcctcgacgcgtccgcctcgggcgccagagcgcaaggacgcacgtaggtcgccccggcggcgatgaagccgtacgtctcttgttgggtcgggtggacgaccggcaccgccggcggtggccatggcgagacgggcgcaacaggcgagagcggcgtggccatggcagggtcgacggtcgacggattgacggccagaggcagttcggcggcaaggtcgtccggttgaggcgcagcaacgtcgtcgctcgtcgtcgtcgctcccttcagcccagccaccctagctcctcccagcacaggaggatcagctcaggagagagcaggtgttgagagctgccgctactcgaccaagtgaaattgcggacgagcaggcgagaggcatcgggtatgagctgtgcgttaggctggccgctctggccgtccctctacagcctgccttctgcttgaccagccctcctctcttcctgaaggcacgtcgtcctcctcgagtcagacggaggatccttgccagctcgttctccagtcgacggtcgacctcgcttctgccccctgctcgtcaacctcgccgtcgtccgttcgacgggctgtgacgctcgctgacaaagccaaaggcgtgctggcggggtcccgctttcaaggtcggagggacggagacgacgaggacgagacgggaagtgcatcctcctccttcgactcccatagacaccctctctccctttctctcctcatagaccttttcgcttgctttcaaagatggccaacgcaccccacggaggagagctcaaggtccgtcgctcgagtcgtcatcggcagcacgcccgaccgaccgactccgcctttcacgccgctcgctgacgacttcccgcaacgacgacacaggacctcgtcgctcgggacctgcccctgcgcgagcagcttgacaaggaggccgccggcctgcccgacatcgtcctgtccgaggtgcgtcctgtggcttgcttcgcagcattcgccgccgttcgtgcgcgtgctgactgagcccgccactactgccgtctcgaacccttcctcccttagcggcacatctgcgacctcgagctcatcatgaacggtggcttctcgccgctcgagggcttcatgaaccaggccgactatctttcgtgcgtccccatgacgagtcgactgttctacgcgaaagggcgagcagccgggctgaccgcgacgcgtccctccttctcccctcccctccagggtcgtcaacacgctccggctcaagtcgggcgcgctcttcccgatgcctatcacgctcgacgtctcggacgagattgccgcggcgctcaaggccggcgaccgcgtcgccctccgcgacccgcgggacgacaatgtcctcgccgtcctgacggtcgacgacgtctatcagcccgacaaggcgctcgaggcagagaacgtcatgggcgccgacgacattgcccacccggctgttcgctacctgcgcgagacgaccaagggcttttacgtcggcggcaaggtccaggccgtccgcccgccagcgcactttgactatgtcgcccttcgctgttggtccccgctcgctttcgccagggcgccaagccttcccctttgtttttgcgaccgcggctgactgacgccttcttgcgccatcgcgtccctgccgttccccagtcacgcccgccgagctccgcgcccactttgacaaggtcgcgtggcgcaaggtcgttgccttccaggttcgcccgtcctcctcgaccgaattgcgctgcacagtccaccatccgtcccgctcactgacggcttaccttccgccactcgacagacccgcaacccgatgcatcgcgcccaccgggagctcaccgtccgggccgcccgcgaccgccaggccaacgtcctcatccaccccgtcgtcggcctgaccaagcccggagacgtcgaccactacacccgcgtccgggcctattccgccctcatggccaaatagtgcgttctgctcgacctcgcgactgccgcctgcgtctctgctgacgcgagctgtctcgccttaatccccagccccaacggcatggcccaccttgcccttctcccgctcgccatgcgcatggccggcccgcgcgaggccgtctggcacgccatcatccgcaagaactttggcgcaacccactttatcgtcggccgcgaccacgccggcccgggcaaaaactcgcagggcgtcgacttctacggcccttacgacgcccaggagctcgtcacctcgttcaaggacgagcttcacatcgagatggtgccgttccagcaaatgtcttacatccccgagacggacgagtacatgcctcgcgaccaggtccccaaggggaccgtcaccgccgacatttccggcaccgagctccggcgccggctcaagacgggcgcgtcgatccccgactggttctcgtacgagaatgtcgtcaaggtccttcgcgagtcgtacccgccccgcaacaagcagggctttaccctcctcctctcgggcctccacggctcaggcaaggacacgatcgctcgcgctctccaggtcgtcctcaaccagcagggcggccggtccgtctcgctcctcctcggcgagaccgtccggcacgagctctcgtccgagctcggcttctcggaggaggaccggcacaagaatgtccagcgcatcggctttgttgctgtgcgtcctcgttggcgactctacgctcttccgcagcagaagctgaccctcctttatttcgaacccgcaggctgagctgacccgtgccggcgccgccgtcattgccaccccgactgctccctacgcgcgctcgcgggcggccgcgcgcgacatcgtcgagcggaccggcggcccctcgggcggcaccttcttcctcgtccacgtcgcgacctcgcttgcctactgcgaggcccatgaccgccagggcctctacaaggccgctcgcgccggcgagatcaagggcttcaccggcgtcgacgcgccgtacgaggccccgcagggcaaggaggtcgacctgactgtcgacctcgacacaatgaccgtgcccgaggtcgtccacggtgcgtctcgctccgttgcgcttgagcctggctggcgtgtagagggcgttccgctgatctcatcacatctcgttccccctcgtcagccgtcgtcctcctgctcgaggccaacggtctcctctccaactagatgcacctccgggccgtccctcttcggccttcctctggccctccgctcgcccctcttacatgaggcctgttgtaaccctcgcgcgtgtctgtcagctcgcttagaagcgtgtgcaatcgttggcggccagacgagatccgacggccgggaagaggccacgtccgagtcggcctcggccggcctcgcctgctgccttcgcttgttttcctgcgcccgccccaacctcttcaatcatgacgcccatccttctcctgattgcgcctgtccgtcttccgccaagcggggctgctttggactcgaaagggccgtcggcgcggtcaggggccagcaggggcgcgtcgtaagggcttcaggctgctgcgcgcgcttgagccccctttctctctcgccggcccttcgctcgggctctcgtatcgttgccttcctctcaatcaccactcacccttctaccattgtcactgcacctcttgcaagcatgtcagctccatctccacctggcgctgctcaggctgccgtcagcattacgtccggctcgccctcggcgtcggcttcagcctcgtccagccgctcctggctcgcacccctctcggccggctcgcttctggatgccgcctgagctttggctcaacgccttcaaacacctctcctaagccgacctcaagcgggctcgctgggttagcaaggcttgggccaagctcgtccaggatcggtcgctcgacggcgcgctcttccagctctcgccgtccaaggctcggcacaaggcgctcttcgagaaggcagaggtcctccgcgaggcccatctcttacggcagacgctcatgctgcccgaaagtcccgcgattcgggcggccggagcgagagcgactgccatgatggtcggcgcgttcctcgccacgcctggcgaggtcccggtgcctgtcgtcgtccatccgctcttcctccgcgtccaccgttacggcatcgacaaccgcaccggcaagttctctgtccgactcgaaccggccatcagccaaggcgacaatgtcttccggatgttgtctagcgtcgcttcgagcgtctttggctctgagccagacacggccgccgtccttgtccgcggggcccaaacgtcggccgtgccggacagtctggtcggccccgccattccagtccgttgcatcccggcgttcaacgagagcgcgacgtcgcccgctttctcgtgcatccgagcgctctttgcccacgagcagctgtcgccggtgtctgcgccatccgttccaaatgtcgtccgacacgcgaccaacaaggccgtcactgtcggcgaactcgtccggctcgtctgacagagccactttcgcggacacagaggcgccatgctaccggcagtcgacgctgttcccggtcaccaagaaggacatcgaaattggctggccgtgctttagcagctacgccgacgagggcgtccaactttacctcgttgtgtgaagctgtctcgaacttgtacgtctcgccggcctactcgtcttcaaacgccgcctggaaagcgcatcgtctgaccatctcatactacaactctccctcgtgcagtctagccacccgatgcgctagatcaggccacaagtaccgcagctcaaaagcgccggcgagcgcgtccatcgcccgtccgtcctcgatgacctatttccctctaccctcggcaagcagagactgaccgtccacttgcctctctctctttctccctcatcaaggactcgtcgagacctccagacggcggaagggggagacttgggagggcaaggtgggattcgcagcagctggctttgaaacgcgatgaccgcgcccaggccagttgaagcgagcgcgcgagcgaccaggaaagcaacgttatgtcatcatcgtgcgagagaaagaagcaagcgagaaaggggggtcccagatgtaaagatctagagctcggccctgagaccggcctttgccctcgggaccgatgacggcgccgccgccgctgctgcgtcacctcctccaccgtcgccagtgaggctcgcgatccgcgctgcccattcgcgcccgagccaggcctggagacaggcgacgaaaccggtcgagcagcgggctttaagcgtctgccagcgggtggtgagcgaggagcggaaggcgtgccagaggtgggcggccgtcgttgaggaggagggaggggaggcgctgctgctgctgctgctccggcggcgagaagccgaggcagagcgtgatgggttcctctgcagagcgcgaaaaagaaagcaaacgagtcagtgcgcgcgttaaagcgagagccaaggaagagaacgggacgcacgaccctcggcgtcacctgatccgatacgccctcggccgcctgcctctcggcgtagatctggcggaactgctcgacggaatgaagcgattcggaaaagcggtggagcgtgttgaacagggcgacgatctcctgccggctcaggagggtcgggttgacgaccgggctgtgttcacgcgtgcacgcaaaagacgaggacggccgtcagtcaggtctctggctgttagggtaaaggcgagctgggggaaagggggagggggaacctactcgagcgtcgcctcgtcgagctcaaagagaattttaagcgcggtcccgattccctggacctggaccttgccccagagccggcacttgtcgcagccgacgcagtccatgatgcgcgagacgttgcggaagcggtccttaaattcttccttgaggacctgcaggagcggagagggggctacgtcagtcgttaaagggagagtgaccgagccggggagaggtcgtaccgccgcatcctcgcctctgaacagctcacgctcgtcaaacacccggccgtcgacctcatcgcccgccgccttcttcaccgcctcgacgacgttcctcagctcgccctctgccgcccgatcgagtccctcgtctcctcccgtgcagacatcgtacgccgcgaggtaaggccccgcccggtcgactgcgcgcaggaggacggcgaggttgaagtaaatgttttgaagccggtccgggtgcgaagcgatgcggccgatgaagcagtcgaggttgggcgcccagaggccggtcgaggtgtcgaggtagtcggagcagatgtgagtgctgatgctcgcatggaggcctatcaagaaggggcgtgtcagtgagcctgtgcgagcgagaggggaggagaaaggggaagtgacggaccagagataacgcggtaatagacgcgcttctcgaggcattcctcctcgtccatctcgtccttccggccttcagccacgagcagcccgcctccaccgccggctcctccgacaggggccgtcaagcccgcaccaaaagccggcgaaggcggtgccgccccgctcaaaacgctccctaccgccgcgctgctcgacaaccctcctcctcctcctccgctgccgctgctcatcgcgccaaacgctcctcctcctccagcgcccatctcccccagcccaaaacagttctcccgatagatcgccccccagacccttcctgcgctctcgccggcgtaacctgtgaagcgctctgggttgagcgcgaggtcgacgtacgacccgctgccggaggcggcttcgtccgaggggaggcaaaagtcggcttcgagcggagagcacgagggagcgggctcggttccggactgggaagccccgggtgggggggggggcagaagacggcatacgagatactgatcggtctcgtgggctcggagatgtgtataagggacagtgcatagtctaacgagaacagaggcgaggcaagagggaccgcgacgaccgcaactttcggcgggcgtcacgaatctgaaccagcgggtttcggaggagtcggccggccggttggtcggccctgggcggatgagcaaggaagggagggaggcagggggagtcggtcgtagagcggcttgtgaagttgaggagaaggtgagctcagccccggccgaggacgcgcttcatcagacttcctttccggccgagcccagcccctccgctcgtccctcctccgctgccgccaccagcaggcgtcccagccccgtacccccctccgctgccgctgcccggcccgctgtccgcgaagcgcgccgggtagtcttgcccgggcaggtcgatcggcgccggcgggggcacaggcgagcgagtgcgtccgatctggcgggtcgacgaggtcgaaggcgtcgagcggtgctgctgctgctgctgctgctgagggtgttggcgctgagcgtgcgcagaggtcgaagtcggggcgtaaagggttcggtcggacggtcggcgagcggcaggcatagcgctgacagccggctcgggggcgtccgcgaacgggtcggacgcatcgtcgtcgttctggttggcgccagtcgggcctgatcggtcgtcgtccggcacgcgagggagcgacttgtcccttgttgtcgaagacccgccgccgccgccgccgctcggagcaaggacagggccgagcgtcgcgatcgagccgtggctgacgctcgagctcatcaggtccgagcgcgagcgcgtccggccgtgctgctggtcctgctgttgacgttgctggtcgctgtggaagctgtggtcggacgtcggggagggtcccgcgggcgacgacccgcccgagtggctgtcggacgacatctggcggccgaagaagcctcggcgggccgcctgctgctgctgcgagccgaaagcagagtacgaagccgacgtagggagcgagctgccaagcggcgccgagcccggtccaccgccaccagagccgggcgagctcggcttgacctcttggacgatcgggacgtttgggctgtcgcgcatgttgcggatgcgctgcatgagcgagcgagagcgcttgacggtcgctcctcctccggcgacggcgggcgttgagccgtagctaccgctgttgacatcgccggctggattggcaagacgagagcaggtcagcctaagtggaaggtggagcggtcagacgatgtgacgacgcacccgacaggacttcctcgaccgcccctccatccgcgtcacccgcgtacgactcggtcagcgagtatttgcggtcggcgtcgttgccggccgagcgggccggcaaaggcgggggcgagggctgggcgtgcgcatggcgctcgtgccctttccagatcgaggaggaggccgaggcgagaccggtgtcgccgcgaggaccggtagcggccgcctgccaggattggacagggagagtgtcagcgccacttcagcggtgaaaggggcgtgagtgaagacggaccatggcgctaaaatcctcgaacggctccgggtcagcgacgccccaagcgttcgcgagcgcattcttcttctcctttgcccgcgcattcaggtagtcgtcctcatccggcaggggcgtgtcgcgctcgcgcgagccccgccgatcgccgccggcgctcccctcgctgatgctcgcgccgttcttgcggtcgcgcgagcgcgagcggatgagcttgagcccacgcgacattgccccgcctccactgctgcttcccgcagggggcgtccgggcgtccgagccgttgcctgaagcaggaaccgtcggcaggacgtcaaagtacgactctgcgccctcggtcccgtacgtcggcgcgctgtgcggtcccgcgccaggcgagcccttcgtgtcgtcggcaaacttgatcgaccccatcttctcgagcgtccggttcgcgagcgctgagaggccccggcggctcgcggatgctgcgggtgggggaggggcagctgaggaggacgagtcatcaaaggcgcccatcggggctgcgcgggacgacgtcttgaggttgcgcgagggcgcggcggcgtcgtaggccgactcatggtgaagcactgacggaggatgatgagtcagccgagggcgctgaaaatggacaagcaacaaagagaactcactgccgccccagagatttgacgggtcaagcttgtcgatagcgtcggcgtgccttgagcccttcttcgcgcccgagctgccgctagtcgtcgtcgacttgctcggccggctcgcccggtccgagaacggatcgtgcgacgagccgcccgtcgtcctcgacttgctgttgctggagcggccgacgggcgcgccggaagaggtcgagtgcgagtagccgttgaagggctgggttgttgctgcggaagactggtccgaggtcgatcgccgcggtgcgggaggaggagagagcgtcgtcgagctgcgttcgggcgaggagagcagcggggcagaagtcagtcgagggggaaaagaatgagaaggggagggcagggcggtcgggtctcccctctccgacgctagcttcaggtctcccttcgttgcgcccatgttacaacccatcctctagcaaggtccccgagcagctctccactcgcgctgaagtagtagaggcagccctcgcgagctcctcgactggatgcgacgaaccgagaaggacgatgcggccgagcaggagagggggggagggctgaaggctgcagcagccgctgctgccccgccagtagctcgtcctcctcctctcccttctttgctcgccttcctccctcggcagccactgaccccaacgggagaaagacagctggatgcgagtgatccggagaaccaaataaaacaagcccgacgtaccctttttcaggtaggccgacgaccgtgtcccggacggcggcgagcatcgcagagtcggccggcatcgtcgacggtcgagcgggcgagcgctaggtcggcggaggggcgcttcttgctggagtgagggcgggtgtcgctgagtgtgctagccgagggatgtcgagtgcaaggtaagaggtccgtttgaggacttattgtcagacgaggtcggagagagaggagagggcgaagagaaggcgcggcggtggcggcggcggtccaaccgggcgggccgacacaacacccagcgcagcgcgcgtaaggccggccgcctggcagatcaactcatgtccttcaaggagcgacacagctcgtcgtcagagagggtcggacgccttgcgagcgaggcaaggggcgggctgaccgacttgtgcacaagccgaggtgcaactgactgtgcgacagccgcctgcaacacatcgcttcgacagaccgacgctccgggcgaggcagatgacagtcattctagagaggagcacagagactaagtttggaggttgagagggagcagagcaagcgtccgggcgagggggatcggccgcccgaacgggagagcgagagagagaggagacaggacgggagaggaggagggaggagcgaaagaagaagggagtctgctgggcaaacaacccccgcgtctagggcccaagtagaggagggaagtggcggtacatcgtggagataagtcatgcgagtgagagagcggcgagatgggagagagaaaagaaagagttcgtggtccagttgcgaggggcggatccgacgtgggaagcgaaagaggaaaggagagtgcggagggaacgcttgagcagagagagggaagaagagaagaagaagatcacgggcgcgacagcgtctcgcggcggtctgaagaagggggcacaggggagtcgtcagtcacgggtcggcttgggcgaaaaggaattagccgagcgggcgagcaagaaagtaagtagactgacagaaccagaagtagccgacgacgatgactagctggcagatgaggccggcccagaacgggcccgacgccatcggcgagcccttgatgccgtcgctgaacgtccagtacgaggcgtcgggaaagacggagccagggccaatccggttcggcgccgtcttgcgcgcgaccatgaccgagatggagccgatgactggtggggggggaggtagcagggtcagccgagtggatcgcaagcgagcaaggtcggatggacgtactctgagcgagggcgagcgtcgcgcagacatggagccgcgagagcgtctggaggaggatcatgccgagaccgatgccctggatggcgtcgaggactccgagccagagccagagaccggtgccgaggtagggtccgacggggccagcccacgggatgtacactgcacgcgggcaaaagcgagtcagcgactgcgcgcgaacggagaagagaagagcgacaaagggacgcacgggcgagagacgacgtgccccagagcatctggcaccagcgcgggcagccgaggccgacggcaaagacgcagaggatccaagagtgcgtctttgagagcttggtcaggattgcgaggaggacgccccagacgccgatgaagaagacgaggaccatgatgaggatgccccaggtcgggatccgcgtgttggaccaaaggaaggaccagttgcggccgtagggacccgagagccagtacgactggaggatctcggcgcagaggaacctacaggagcgaggggagaggggaagcgtcagctctccgggcagccgaggaaggcggcgcggcgacacaccagatgacgagcttgcgccggaagagcgtccggtagaagttggggaccgccggcgggacctgcttgtagtagtcgggcaggccccagcgaaggcacgcaaagaagaggaggcagacgacggcaagcggccagacgatcagacagatccaccacggctggtggacgcccggcgcgctgcccgaaagcttgttgccccagtaccagagcgcggtcgtccagagctgctggaggccctggaccatgcacgcgcgcagggcccagacctcggtcgcggcgccagcctcttcgccgaagttgcagccgaaaaagaggaagccggcggccgaggcaatcgcgtaggcccacgaggcgccgtccgagatgccagagttgacgccctgggaaaagttgcagacggccgggaggccgatcatgaaaaaggcgatggcgaagaagatccacgggatcgagaggacgaggaccgagggcttgtaccggaagaggccgtaccagacgaacgagaaaaagaggaagatctgcaaggaagaggagggagtcagccagggcgcgcgcgcgggagcgtgagagcaagggcagggaagaccgaccgaactgaggacgtagagcgcccggtccttctggtagttggaaccagaaagcagcgtcatctggtacgacgtggccgagagcatctggccggcgccgagaatgatgcagtagagcggccacttgccaatctggcgctgcatcgtaatctggagccgggtcatcatgacgtcgggcgcaaacttgtcgtggacgccgccgccgccatcgtcggccatcgtcgccatgttgccgtcgtactggccgtgcggctggtgctggttgtcggacgagccgtactcgtagccggcgtcgggcgagccggcccggtcgccgtacgagttgtacgagtagtggagcgagggcgccggcgtgccaaacgtcgagtcgcgcgacgacgacttgtacgacgccgtcgacgagatgatcttctccttcttgacgttggcaaagtacttgcgctcgctcttgacgaggaactgctcgatgcacaggtcggccttcgagttatcggcgctcagcagctggagcttctggataaagtcctgcgcgacgtctccgttggcgtccgtaaagtcgacgattgccttgttgaggggcgagctcgaggccttgtcgtccatgatggacgagatcgactcgacgctcgagacgcgcgagttgatcgtgaacggccggtcgggcgtccggtcgccgccctcgacaaacggatcgcgggtgccgcgcgactcctttgcaatctgccgattggcgcgcgcgaggaagtcgtcgtacgtctgaatgtcgcgcgggctcgacggctcggccggcgtaatgtcttcaaagccgccgtaaatgctgttggcgtcgtcgtagccgccggcgctcgtcgcgaccgaggtgacggaaccgcggcgcgagccgtggccgtaaggctgctggagctcctcgctctccgacaggggcgagcccggcatgcccgggttgggcgcgtgcgggtacatgtcggcgtacttctggctgatgccggtgtggccctccgagtcaaccgacgaccaggccatcgggccggcgacgtcgcggctaacgcgaatcgaccgccggtggaagtcctcggtccgctggcgccattcaacgacagggaaacgctggacgccggaccgggcacggaggatcgcccgctgctcctcggtcgacttgagcgcgagcttgatcgttttggagagctgcgagagcatgtgcttcgtcgagtcggactcgacggggaaccactgcaagcggaagggaggagtgtcagcgagggcaagcgcgcaaggacacagaggagtagcgagtgacgaacccatccgggcatgagaccgagacctccaagccgggagccgacgccgagcgcgcccttgcggccgaactcgacggcgacgagaccgaagggctcgtcgcgcgacggaatcagggcgaagtcggcgccactaaagatgtaaggcggcagggcggtgaattcgggcttggagaagacgcggtccgggtacatctccatgagccgggcaagcttctcggccgcgaaccggccgtagaggtcgatgaccgggccgacacagacgacctggaggtgcggccgcttctcgagcaggcttggcataacgtcggcaatcaggtcgacacccttctgcttcgaccaacggccgacgaagacaaagaggtcggcccgcgggtcctgcttgaggccggcccactcttggcagagccgcttgttctcgggccgctgcttctcggcgacctcgtcaatgacaatcttgtcgagcgcgattggctcctcgtcgagcgcggcaatgtcggtcggatccgggttcggaagcgagtcgatcgcgcggagcgtccagagcgccgggtagcgcgcccacgagcgcttgccgtacttgtcagagacaccagcgacgccgatcgaattctggtggacgctgataaaggccgcgcctgcgtggagcaggttgaacgtgttgccgaattggacgtactgcgaagggtaaatgacgtcagcgagagagagcagagagagagagcaccgactggggcgaggagctgaccttcgtgcagatctccttgctgatgttgaaggcggcgcagacctccttcatctcctcctttgtccggagcggccagagaccctggaactctgcattgtggagcgagaggcagacggggacgaccttgggcaggaggtagagcggggcgagcgcgccgtggtagtcgttgatgtggtagatgtcgatgacgggatgccggcggatcgtctccgcaatcgcctggttccaggccgagtagaagatggccgacgagaggtcgtccatccgggccggatacgggtccgacttggtctgggcgcggaagacgggcgaatcgaggatatagtaggtaatgttgtcgacgacgtgcgactcgacctcgatcaggtacgactcgccaaagatggtgacctcaatcgggtcggcgtactcgccggccggatactcgagatccttgaccttgggcacgacccagacgaggtcgacgtcagtcatggccttgcctgcgagtgaggaaggagggtcagcacgagcaacaacgagggcacacagaatgaaggcacgcacccatcaacgttgacatgacgccgagaccgccaatcttgaccttgagcttccagtcgatgatctcgtactcgagcgaggcaatcaagaccttgcggcgcggcttcttgggatcctcgggccaaccaatgacggcgcccgacttggtcgggatgatggccgccgcgacgccgccgacgaggccggcgcccttcttttccgacatgccgccttttttgagggcgtccatgatggggaagtaggacgtcttttcgggcttgacgccccactcgttggtcctgatgccgtagaagcgccacttgaagacgaggcaggcaatgatggcggtgaggatcgggatcgtgagcaggagcgcaaacatgacggccgagaccgaggcctggccctgaggctcgaggtgccaggcgcccgtctggtcgttgacgacgagcttccaggcaatgtaagggtgcggcggtgccgacatgttgaggtagttgggcgcgttggacgagggcgggagcctatcgagcacgccgtcgccatcgacgtcgccgaagaagtagtcgtcgtagccaaagctgaagaagaaaaaaggcggtgagcctggggagggtcgcaaaggttcgaggcaggaggcaggaacgtacacgcagagctggacaatcgtcggccacgaggccgagagctggagcgaccactcgcccggcgtctcggtcgactgaatcatctggttcgaaactccctggtcgtagccccagttgttgaacggcccgcgcgcgaggtaagtcggcacgcgccgcgggtgattgtagccaatgtcggcgtgaaccgagacaggctgggcgctcgccgtctcagaccagtactggacgatgacgtggtggccctgccagccgtcgagcgcaaagaccgacttatcaatgacggtctcggcctcccaggcaaaccagtcggtccagttctggccgtagttccaggtgtagcggataatgtcggcgccgatggccgtgtgcttgagcaggaagccgtcgtccgactcggtaaagatggcattgttgtagtcgttttcggggaagacgagcgggttgtcggccttgcccttgcggagctggaggtggtcgcgcacgccggtcgagccaacccgggcgtcctgggcggtgaccgagccgacggtgatttcgaggatgccgtcggggatgttggtgatggtcgccttcatctgccaggccgaggggtccacgccgtagatgaggccgtcgcgcgggccgttgaaatcgctgcaagtgacggccgtcagctgcgggctaccgctcgtcgtgttggagtgggcaaaggtgatggcgttctggagcgactggcagtccatcggcgtgttgtactcaatcgtgatgtcgaccgaggccgccgagtcgttggagaggatccgggcgtcgtggccgggcaggaaacgcgtcatggccgccgcctggggcatccagtcagccagcgggacgtacgcccgatacgagtaggcgctcatcgaaattcgcgggaggcagccgcgccacggcgccgtcgtgttgtcatagtagctgttgcgcgactccgagagcgtgatgttgtcatacgggtagatgatgtttcggatttcgtcgccgcccatgaatggcgtcgagatccactgctccgacaggcagtcaaactcgtacgacgtcgtctggttctcgttcgtgtagaggagccaaacctgcgtgttgcgcggcttgtcctcgaaatactcgttttcgatgtccgggatcgccgaccgggcggccgaccagaggccgagctcggtctgcgtcaggttggaaccgggcagctggacgaagcgcgtaaagttgccgaattgaacgaggttcatgccgtcctggagcgaagggtaaagcgcgcggaggtggtggaactgcttgagctggcgccggaccatcgccgtcgggtcgaaatggtcgagcgagttccaggggtcctcgcagccgatcagggacttttcaagcggcatgttgtaatactggtccgagccaaggtggtagcagccgtgacgctgccaggccgtcgaagaggccatcggctgccggccgtagaggtagtttgacgcgccgttgtcaaagacgtacatcccttgctcgtcgccatagtaggcgagcgggatgccaggcaggaggagcgtcgtgataaacgaggcgagcgccgaccggtcgacaccaaactcgagcgcgccccagcgaaagacgtcaaagttgccgatgccgtacatgtgcttgacgtcaaacttgccgttgcccgggttaataaagtcgttcgaaaggatcatctggttgtaggccgagataaagttgacgtcaatgtcgtaggcgacggcgaggttgccgtccatcccgaggaagcgcgtcaggccgcggtaaatcgagtaatggcaggcgacgccgtcgagcgcattgccgtccgtctggccgcgaatgaagtagacgtcgtcagtcttgttgaccttgacggcaatgtcaaagcgggccggcttctggccgggcgtccggccgcggcccatgtagagcgaggagtagacgttgccgccggtgacctcgcccgagatgaagaagttttccttgccgagcgcgatcgcacagtcgcgcgtgtggctcgcccaggccgtgaggccgccgaccgttacttgcgtcgccttgtcgatccgaatcgcgtcaatgtcgagcgccttgatggccatgcacgaaaagcgctggatcttggccatgacgaccgggtcccactcgcgcagccggtcctggaccgacgagaatttggatagctggcgctgccagtccgggtggacgccaaaggcctccatgtcgccgtactggtcaaactcggaggagtagcagccaggctgctcgaccgagagctggtagccgtcctcgccccagaagacgggcagctcgcacgtgtcgttgaaggagttggagaactggcgcagcagtggtggtggggccgagtaggaggggtcagccggctgcgtccacaggccgagcgagccaccgggcaaacgcgcgcaccttgaagtccgcgtactcgttgatgccccacggcgcgtacgacgggtgcttccacagaacgtcgtactcgttcaggctgaacggcgtcgacgagttgaggtggctgcgagggagggcaagaagcggtcagccaaggtgcgataaggtaagcgccggcaagcgacgcacccctcgaacgcgataaagtcgttcatcgtgccgacggtaaagtcgagcatgatgtacatgccccgcgagtgcatctcgtcaatcaggtcgcgccagtcgtcgagcgtgccccagtgggggtccgtcagcgaaaagtcgatcggcgagtacgagtcggcctgccaaggcatgttgacctgcggggcgagagggagctgggtcagactctgttatgggaggcagcagggcacgagagaacggacaaagatggtgccggcaatgtagatggcccggaagcccatgccctggatgtagtcgagccggccgcgaaggcccttgacgtcgccgccgtagcggaagttgatctgaagcgagtccgactcgtgctgcgtgccgaaaaagtcgttgttgcgcgggtcgccatcctaacgaatgagaaggaggaggaaagtcaggatccgttgaagcagcgtggtagggacgacgcgccgccggccggccggcggcgcgtcgtccctaccacgctgcttcaacggatcctgactttcctcctccttctcccccttcacgacccccctctacgcccttcctctccctcttccgtgtcctttttctccttccatacccccctagacttctaaaggagaagaacgaccatggccgaggaactcgcccgcaaggagctgctcctgcgcgagctggtcgtgcacatcgccggccggacgggcatgctgctcgagctcgtcaactacaacgtcgagggtgcgtccttatctcttggaggacttctcggggctgggtcgggatgcaggttgacctcgactgtgactctctcttctgatctgcaggcaccgtgagtcgctttcctgctcgcgtcggagggagggagccgctagctccgcttcccaacggccccgtggcctgacaagaagcccggcttgcagagctctcctcttcttggccatgcagtggccgacagctgattccttctctgttgctctccgccgcctccgtcgtgcctcagcaatacggtccgtcgcctcctacttccgcctgagcctctgcgcgccgcgacttgagctgaccgcgcgcctcgcgccgacaccttccgatctccccaccccgcctcgcagtcgccgccggtgagaacctcgcgctcgcgacgctcggcaacgtcctcaacttcatcaaggtccagaaggtcgacatgaagaagctgaaggagacgctgacggtcgaccagctcaaggagaaggtgcgtttctcctttctggcctctgtgtagcggacaaaagctgacctgcaacggcgcttcgtcctccagctgaaccggattatcgacgagtcgctcaaggcggcgcaggagaaggccaaggaggacggctacgtcaagctcgagcgtggatttggtgcgtgacgagcttacttcgtccgtcgcgctctccgcttcgacgctgacgagacgctctctcccgcttgcagcgacgatcccgctgcccggtatcgacgttccgttccactcgaagtatctctggtcgggcgtttcgcccttcctcaagtacctctcgaagaaggtctcggctgccgacctcaacccggagcttctcgtcggactctacatccccaacctgattgccgacccgttccagattagccgcgagtacgcgcagaagatcttcgaccagacgggtgcgtctgaccatctgcgctcttcccttgcgcgcggcagcccgctgactctgatttctttttgactcgccaggctcgccccggatgaagaagctcatcgacacgaccgaggacgcgacgtgggacgcgccagagcaccgtcagcggctcgcctaccacattctcatcgagcttctcgcctaccagtttgcttcgtgcgtcgacagcccctcgaccgtctgctttcgtctcggctttgatctgacgccctattttcgctctgcaggcccgtccgctggattgagacgcaggacctcctcttcgactactaccagtttgaacgcctgatcgaggtcggcccgtcaccgaccctgaccggcatggcgacccgcacgctcggcctcaagtacgccgtccgggacggccccgtctcgcgcaagcgtgagatcctcgcccatgccaagaacaccaaggaggtctactaccagttcgaggacgaagccgaggaggcgccggccgcccccgctgagtcgtcgtcgtcgtctgccccggcccccgccgccgccgctccggctgccgctaccccgcctccgccttcgagcggtggcgcgcccgccgccgaagtgcccgacgcgcccctcaaggccgtcgacacggtccgcgtcatcatcgcccagaagctcaagaagggcgtcagcgaggttccgctcaccaagacgatcaaggacctcgtcggcggcaagtcgacgcttcagaacgagctcctgtctgacctccagctcgagtttggctcggcgcccgagaagggcgaagagctcccgcttgacgagctcggtgccgccattcagttcggctacagcggcgcgatcggcaagtgcaccggcgcgctcatctcgcgcatgattggcggtaagatgcccggaggcttcaacctttcgtcggccaaggcccacatctccaagacgtggggtctcggcccatctcggacggacgccgccctcctgctcggtgtcaccatggagccgccgaagcggctcggcaatgagggcgaggccaaggcctggctcgaccaggtcgtcggcgtctacgcccagcaggccggcatctcgctcagcaccggcggcggtggaggtggaggcggcggcggtggcggcggcggtgccgtcatcaactcggaggagtttgtgaagttccagaaggaccaggacgagttccacgagcgccacatcgacctctacatgcgcaagctcggcaaggacccgcgcgccggccaccggctggcggacgtcgagaaggccaacgggctcgcgctccaggcccagctcgacgcgatcgcgcttgagcacggcgacacctacatctcgggcatccagccaatctttgagccgatgaaagctcggcatttcgactcgcactggaactgggtccggcaggacgccctcatcatgttccacgacatcatctttggccggctcaagactgtcgaccgcgagatcacctcgcgctgcatcgctatcatgaaccgggccgacccgacgctcatcgactacatgcagtaccacgtcgaccaggtctcaatcgagcagggcgagacgttcaagctcgccaaggagtttggtcagcagctgcttgacaactgccgcgaggtcctccacgaggcgcccgtctacaaggacgttaccttcccgacggcgcccaagaccgagatcaccgccaagggcgacatcgtctactcggaggtcgtccgcgaaaacgtccgcaagctcgaggcctacgtccacgagatggcccagggcggcaagatttcgcccggccagaacgtcaacctcgagaaggtccagtccgacgtctcgaagctctggaagctcgtcaaggcccagccgcagatctcgcgcggcaacaaggcggccatcaagtctctctacggcgaagttgtcaagaacctcgcccgcaacgagggccggcccgctcggaccgctggccgctcgcgccgctcgtcgtcgcagttcatgcggcccgcgaccatctcggagcaggcctcgtcggccgtcaccggcgtcaccgacaagctgccgctcctccacctcaagcgcaaggtcggcactgcctggcagtactcgtccaagctgacgtcggtttacctcgacgttctcaccgagattgcgacctcgggcacgacctttaagggcaagaatgcgctcctcaccggcgtcggcaagggctcgatcggcgtcgagatcctcaagggtctcctcgccggcggtgcgaccgtcgtcgtcacgacctcgcgcttcaaccgcaagacggtcgagtactaccagacgatcttccaggagtttggctcgcgcggctcggccctcaccgtcgtccccttcaaccagggctcgaagcaggacgtcgaggccctcgtcgactacatttactcgacgctcgccctcgacctcgactacatcgtccccttcgccgccgtcccggagaacggccgcgagatcgacggccttgacgacaagtcggagctcgctcaccgcgtcatgcttgtgcgtctttgcatctcttagcttgtcgcgtcgctcggcctcgcactgacccgctttcgcttcgccttttgccccttccagaccaacctgctgcgcctcctcggtgcagtcaagaccaagaaggctgcccgccactttgtcacccgcccgacccaggtcatcctcccgctctcgccgaaccacggcacgttcggcagcgacggtctttacggcgagtcgaagatctcgcttgagacgctcttcgagcgctggcagtccgaatcgtggggcgagtacctctgcctcgccggcgccgtcatcggctggacccgcggcaccggcctcatgggcccgaccaacacggtcgccgagggcctcgagaagctcggcgtccggaccttctctgccaaggagatggcgttcaacatcctcggcctcatgcacccgctcctgttcgacatcactcagatcgagcccgtctgggccgaccttaacggtggcatggaccgcctgccggacctcgccgagacgacgaccaagatccgcaagcagctccagctgacgggcgaccttcgccgggcggtcgcgctcgaccagtcggccgacttcaagatcatcaacggcgtcgacgccgagcgcatccaccagaaggttccgatcgcgccccgggccaacttcaagttcaagttccccgtgctcgattcggccgcggcgctcgagaagctcaacgccacgcgcggcatgattgacctcgacaaggtcatggtcgtcaccggctttgccgaggtcggcccctggggctcgtcgcgcacgcgctgggagatggaggccaagggcgagtttacgattgagggcctgatcgagatggcctggatgatgggcttcatcaagcacttcgacggccggctcaagtcgaccggtaaggccttcgttggctgggtcgacgccaagaccgaggagccggtcgacgacaaggacgtccgggccaagtacgagaaggagatcctcgaccactcgggcattcgcctgatcgagcccgagctcttctacggctacgaccccaagaagaaggccttcaaccaggaggtccagctcaaccacgacctcgagccgatcgaggcctcggccgaggacgccgagcgcttcaagcgcgagcagggggacaacgtcgactgctgggagaccgagtcgggcgagtggttcgtcaagttcaagcgcggcgcccgcgtcctcatccccaagtcggtcaacttcagccgcttcgtcgccggtcagctcccgaccggctggcacgccggccggtttggtctcccggacgacatcatcgcccagaccgaccggaccgccctctgggcgctcgtcgccgtgatggaggcccttgtcatgtcaggcgtctcggacccgtacgagctctacaagtttgtccacccgtccgaggtcggcaccgccatcggctcgggcatgggcggcatgcactcgctgtcgatgatgttcaaggaccgcaaggaggagaaggacgtccagaaggacgtcctccaggagacgtttatcaacacagtcgccggctgggttaacctgctcctcatgtcggccgccggaccggtcaagatccccgtcggcgcgtgcgcgaccgcgctccagtcgctcgagattgcctgcgacaccgtcgcctcgggcaaggctaagatcatgatcgccggtggctttgacgacttctccgaggagggctcgtacgagtttgccaacatgcaggcgacgtccaactcggagaccgagctcaagatgggccgcgagcccaaggagttctcgcgcccgacgacgtcgacccgcgacggctttatggaggcccagggcgccggtgtccagatcatcatgagcgcccggaccgcgctcgagatgggcgccccgatccagggtatcgtcgcctacacgtcgacccacaccgacaaggccggccgctcaatccccgcccctggccgcggtgtcctttcggtcgcacgcgagatcccctcggcgacgccgcacatcacgctcgacatcaagtaccgctcgcgccagctcgcgttccgccgcaagcaaatctcccagtggctcgagaacgagcacgagctccttaagggcgagctcgaggccggcggctcggtcgccaacgtccaggagcgcatctcgcagattgaggaggaggcgactcgccaagagaaggccgcgctcggccaatttggcatgctcgagggctcggacccgcgcatcgcgcccctccgccgcgcgctcgccgtctggaacctcgacatcaactcggtcgacgttgtctcgctgcacggtacgtcgtcgctcccccgatgcccctcggcttgctttcactcgctgacctcttgctcctccctccttcgtaggcacctcgaccaaggcgaacgacaagaacgagacgggcgtctggcaggacatctttacccacctcggccgcaccaagggtaacgccgcgccgtgcattgcccagaagtcgctcaccggtcacccgaagggtgcagccgcatcgtggcagatcaacggcatgatgcaggtcctcgccgacgcgcttgtccccggcaacttcaacgccgacaacatcgcgcccgagctccggaagaacgcccacctcttcttcccctcgaagccgatccagcacgtcaagctcgaggccggcatgatcacctcgttcggcttcggccaggtcggtggtgactgcctcatcctccacccgcggcacctctttgcggccctcgacccagcacactttgctgcctacgcggctaagcgggcgccgcgcgcacgcaagtcgtacctctacagctccgaggcgctcatcaccaactcgctcgtccgaatcaaggagcacccgcagtacacgcccgagcaggagctcgatgtcctcctcaacccgctcgcccggacctcgctcgacaagaagggcgagtactcggtcgcctccaagctgccgaccgccctgcccaaggccgccaaccacggcgcgctccagcttgcgctcaagaacccagccgtcgccggcgtcggcgtcgacaccgagctcatctccgagttcccgtactggaacaaggccttcgtcgagaagaacttcaccgcactcgagattgcccactgctcgaagcagccctcgccccaggcttcgttcgccggccgctgggccgccaaggaggctgccttcaaggccatgggcgtagagtccaagggcgcggccgcccagctcagggacattgagatcaagtgcgtccctactctgctctggttctgcacagtgcgttccgaagctgatctcttcccttctctgtaggcctacgccgaccggccctatcgtcgagctctcggccgagctcaagaagacgcatggctccaagaagatcaagatttcgatctcgcacgactcgaactctgcctcgtacgtctcgctccgattctcgtctctcttggtttggccgctgaccgccgtcgcccctccgtccctcttgcagcgcgtacgccgtcatgacgaccatctagatctcgcctctcttctcccttcatcttagacttctcttctccagctcgtaacgatctctttcatgaccttttttctctccccattctttgcgttctccgaaagtcaagcgcggcaatcttatcggttgggagagcaagtgcacttcgcctcagagggcgcaacgcccagccagcctcgtcccgtgcgacgacagcttgccctcccgacccattaacctcaacccacgttgccatgccctccctacgaagactggctcaggttggctgctcgctcgccctccttggcggggcgctcgccatgctagagaagacggaagagccgaggcccatcttcgtgcgtacccgacgctcgaggccgagctggaccgaccgttttcctcccggccacctccttccgccggctcgatgctgacctcgagtcatctcgtgtgtcgggtctcacaggcctcggagctgtcattatgcgcgcctgtccggcagctcaactccatcaaggcagctctcgatgccgaggagggcgaatcgctctcagagcgggccttctcaacgctcttcccccttgccgagtgagctctctcgtgctcgacgtccgtcctctgctctagctctcgctgattccagctctacttctgcagtccagggcacaatgcgctgcttgccaccttttacatcagctcagtccccaatctgctgctcgccgcgatgccggccgacatcgacccgcagacgctccgcatcatgtctgccttcgccgttggcgccctcttcggcgacattgcactccatctcctgccgcactcgttcctcggcgagcctccgatcgacggtggcgtccaggtggtcgtcgtcgagcccaaacgcaacatcgtcctctccctcgctatcatcgccggcttcctcgcgttcttcctctttgagcgcttcacccgctacttctcgtccgacggctcagaggaggcggcgacaggccactcgcacagtcacaaccacagcgtgttcaacggctcgtcgacttcggtcgagaagagcaggaacgctggcgagctgaggaagcgaggcgcgagtaaagaggttgccgcgcccgcagctgagccccggccgacagaggctactaggagcaaagcagtcggcgccgtcctcaacctcgtcgccgacgcaactcacaactgtgtcgacgctcttacggtcgtcgcagcgttttacgcttctccggtcctcggagcctcgaccgccgtcgcgtgcttcgcgcatgtgcgtcacccttcccatcggcgattccgcttcaggacctcccgctgacgacccgcaaacttcgactctgacgctttgcaggaagtgccgcatcaggtcgccgacctgagcatgctgcgggcgtcaggcttctccaagagccaagcaatcggcgcacagctggcgacaggcgtctgcgcctttgccggaaccttcctcggcatctgggcccatcggtcggccgtcgctggtgtgaccgagaccgagccggacctcgtcgcctcgttgcttggcagtgagtggccagcagtccactcgttcgcggtagattgaagcagccaccttacgctttctcatgctcaccgctcccagcttcgactggcatctggggtagctcggccacggccgctgacctcgttattccggctgttacgggtgccttcatctacatcgccaccgtctcctcgatccccgacctgctgtcgggtcggtcgactggcggccaactcgtcaaggagacgcttgccctggccgtcggtgtcggcattatgggtctcctttcgtggtacgagtagaggaggcggagctgacgaggattgctctccagtgtagtaaagggtctcgtctgtgacaagttgcgccgggaagccagaacgacagaggcgggtcggctggggcagttgcgcgtgcgtcaggagcagccagcggcccgggcttgggcggctctgttatccgtcatttgaataatcatcttggactcgctctatctatgccgtcgccaaccaacgcaccttttcgggttgcgatcggagaaacctaggtgcaggcaggcgacgagagtacgaacgaccggagtttcgccccagcgacgagccgccgcgcaggcgacctcgagcgtcgtcgagcctcctgtcgctcctcacccccatctcctcgccgcctagcacgagtgcgcaagcgagcgctcaacccataggccacattttgcaagggccggcctctgacctgttcgccagccggctatcgactgtgggcagttcccgaagacgcttgctacccttcggccggtcaaccgcccggacccggacctctggcttcgcccagctccatctcaagcatggcaccttcagatgcttcaggtggccactggatacagggttctagcgaggacgagatcagcttcttcccttcccttgcggttcagcgtcaggtcagtcgcgctcgagcagctgctgcagctagccatgtgggccctacgcgtgaccgttgcagtcgcgcgtgcgaccctgacgaccaggactgacccctgcctcgcttctcaatctgctcacaggcgtgggcgctcggtgtactccgccgagaaggtgtccgctcggtgctcgatgtaggctgcggcgaaggcgagcttcagccggtcgtcggtcgacatgccggcgacgcgtatctctttaggccagtccccgtactgaccggccctcccttttgcgccagggaacttgctcagggctgtgcgtgacgttcgcaacctgctagctatcatcagactgtgataacgatgctggagctgacctctctaggtcctatgccgcagctcgtttcgccggcgccgaccatctcggagccgccagtgatgccgtcgcaggacgccgccggagtggcagtcgacatgaacctgcacatcgcggtgagaccgctcacgtcttatcgccaacacgtgcgactgggagcactgaccgagccgaagctgcagtcactcgctggacttgacatcgaccgcaggtcactcgagacgttcgcctcgttctacctgccgccagaccggccaaatgggccgcaagacgacgacgagctttcttcttcgaacggtgcgggctatacgactcgctggtggacggacctcacggtctcgctctggcagggcgatctcactgcggtccgtcgacagcgagtctgcagccacccctcggcttggctgaccccgcacctgcggcgcagtttaacgacgagttctgctcgtgcgaggcgatcgtcgccctcgaggtcatcgagcacctcgagcagcacgtcctcgacaagtttgcgccaatgattctcggcgagtatcggccgcggctcctcctcgtgacgacgcccagttcgtagagattagtctttgagccgactgtgcgcaaggactaactcgccctctgacccttgcagactacgccttcaacagccggttcgaccgtcagggcaaggacaagcgcggcttccttgatccgaccggccggaccaaccgcgtcttccgcaacgacgatcacaaggtgccttgcctcctcctgcctgctttctttgtccctcggctgatccgatccgatccgccctcgtcgcctcgcccggccagatggagtggacgcccgacgaatttcagacgtggtgcgaacaggtcgcgctcgagtacggctacacctgctcgacgtcgctcgtcggccccccgctcggcgacacctcgccgccgacgactgagtcgcgcgcggcgtcgcaggcggccgtcctcacgcgggccgagcccaggccggcgcgctcgccccggtcgctcatgccggcgagcttgccgttctttcatccggaaggcaacgccctgccgaagcacgagctcgtccggcgcgcggtcctgccggctctgccctcggcgggtcagccagcgacggcgcaggagatccgggaggaggtccgtggcttgatggagcactggggccggaccgagcttgcgctgacggagctctggcctgagctcggcgagtttgcaggtgggagcaagcgtgctctgatcgctgtcagtcggattccttcgtcagctacagcagcctcttgtttgaccgctcacacacccgccgctttctcaccaggccctcggaggctggggcaacgtgcctcccgcgacagacgcaaccccctcccgaccctcaacgccctggaccgccgcgccgctcgaccccgccgagttcacgatcttcgtcccgcccgcaccccacgccgggacgccgttcgacgcgaaccagctccgcgtccgctggcgccactttgccgaggcagccggggccgcgctggcgagccaggcggtcgcggtcgtggacgaggatgaaagtcgcgggtatggcgacgaaggcgacggatggggtccgattccggtcgcaatgcagcctggggcggtcaatgacggatgacgcgccagttgcgcccatagaatgtcgcggcctgggtcgagtcgagtgccttgacgctcagtggagtgtcctgaacgttaggcatcttctttcggtctgccggccgccggaacgcgctgcaaaggttggagaggggcctcaatgcaaatgcagcgcagcaagactggccgggtcggcacccacaggaagtgcttcgcaagctcggggctcggaccgttggcggcgacgtctgagcataagacagtcagcttgaagtcgttgtccgtcggctgcgaggagggagaagttgatcagtcgcggccgggtatgtcacgctggcagatgcgcacgtcgtcgtagatgtacacgatcctccagaaaggcagccgcatggtcttcagaccatggtcggtgagtggcggatcagttcagtttgtcaacgccgcacagacagcaagagaaggccgcactccttcccactccgacaatgggatgttggcggcctccaagaagttgaacaagagacagaatggcccggcaatgaggtcagccggcctcagcggggagaggtcgagcgcgtcaccgagcggtggaagcagggcgcgctcatcagccggctccatctctgactctggctttggctcggccgttctgctcgacgagaagaagccgaagatcgacaaacgagtctggctcgagctggtagcggtggcgtcgagcttgcttcgagcgagccccgtcaggagctacacaagcagcgaaaatgatgcctcgcatcagtcagcaagttcgatgatcgctgcagtgaagggccgctgcctcgagacctgacggaccttcggctgcgctgaccgcaggtacgtcgacgacgagcgcgagagcgacggccctgcgagctcctgggcacgccacggcgagagtcagtcagcaggccagcaatcctagaacaagggctgacagattacgcacctgaggagatcgatgctggcgagcgatgcgcgtgctggcctgccgacgggcgaccggctgctgctgctgctgccggtcgagaacaaaagggtctggcagacagagctcgatgctgggcttgggacgcagccctgcagccggacagcagtcgagctggccgacgacgacaggcaccttttgatgagcatgctagttgagcgtactattcagggcgtacagtgcgagggagatgatcggtcggagggagggctgctcgaggtcaagacgacagccggcagcccgccgctcgaacggcgccggccgttgtgcgcgcagcaagtcggcctccccgaaacagacgtcgtcttccacgacggccgcccggtagctagaagaaagagcgggctgggagcgtcgaagattttgctcctgcgtgtaccaggctatccatgctgtcgcggtcgattacggcgggcgttgcgttggcttcacatcaagcactcttgagcgtgccgtccagccctcagcttgggtcgacctccgccccgtttcctgctctgaccgctcgggcagcagtgcccgaggacagtcttgtccatcccagcgcaccctccaaactgcctgctgtctgggctgaaaggagttgaagctcggcaagggagcatgggctgctgcgcccggaccttgctgcttctctcctttcgtcaccggcctcctgcgcttctgtcgtttgcgcctcctctcaactactgctcccgccgacaacctgcgccctgatcaggagccctcttcgagcgacctggccccttcagcccaagtagcccgtcgcgaccagtccgacgtccgctacccagctctacttctcgaagattgccgccccgtcggagactttccaggccgaacggcgctctgctgaacgcgcatcatcgacctcgagcccaacctcagcagcagcccgtgcctccggacgagcccttcgcactagcttccaggccgcctcgcccgttcaccagcggctctacacgtcgttcatctcgcgcgtccgtctcgcacgacccaggcgcatcgcatccagctagctcgaccggaggcagcccagcttcgtctcgccttcgccgccgcagtccacgccttcctctcgcctcctcggtaacctcgcctcccctggctggtctcgcccactcggttttctttctccaattggcccggggctcatgcccgtcctcgccgaggctcttgcgccgttgactgaggcccgggtgctcggcaagccttacagcagctcgccaaccagcggtccgtccgcctgcgcctcccccttccgaactcgcagcctgcgtcgctcggcctagactgaccattctcctccgtctctcctcagatggctcgacggcagagggcgaatccggaataaaactcccgccgctcttctcgcgcttccagaacctcctccatccagacctgcacccggacccgtctccttcgcgcgcccatggccgggccgtccttccaccagacgcctcgacggcggcactcaaccctgactcgcggccgttcgtcaaggtccgctttttgacgtggaacatgcatgagagtctgccgaagggcgacttgacgcccttgctcgggcccgtaccggtctacgtccctccgacgcaagccgaaattgacagcggcctcttgccgcagctgccaatgctgctcgaggatggccagccgccgacgtaccacatgatcgtcgtctcaggccaggagacgccgacgcctagtggcattccgcttggcttggccgccgtcaagtggggcgcgggccactcgcacacctcgacgccgtcaatcgcgacgcacgcgacgtcgccttttgctgttgccgcaggtggtcagcagcaggctgcacagacgccaacattacagaagcagcagcagcaggtgtcgtctcaggcgctgtccacaccagcgcggacggccgcagcgcctcacccgtcaccgctcggaggtacgcaggccaaggcctcggccgacgtgagcggaagcggcggcctacaaccgccagccttctcgctatcacctgcctcccctccgccgacggcgctgtcaccgctcagcagcgctgcagccaccccatcccccgcaccgtcgagcgcgacaccaacgccgctgacgatggcgacatcgggcgcaacgaacgccaaatcgaacctctcgcttcagatccccgggaacggcccgaacggcggcgcatcaagcggcggttcgtcgagtgcgacgagcaagacgggctcgccgacctctggacggacaacggcggctggctcgtctgaccattcggcatccgacgtcggcctgcccgagctcgtcgagcccaagggcggcccgtcgacatcaatcgctagcatggacgggtcttccgacggcatccggcccgacgcggctcaggtcgccggagggaacaaggctagtcagcctaggatgtctgagccaaagggctggagcgagctcctcgaagactggttctgcaaccgcgctggcgagcccttgccgcaccggaccgtggcgccgacgccaacaccgacagcacctggctcggcagacgtctctgacgccgaggaggaaggtgccagcctcgcggtcccttccgagccagccgttcaaagcgccagccggtctttcaaggcggctcgcgtcgtcgaggagggccttggggcttatcagctcgttcgcaaagaacgcatgctcggcatctatctcgccgtctttgtctggaagggcgcctcacacctgctcgaggcgacctcgggttcgtacgtgacgactggcttgatcggcggccggtggggcaacaagggtggcgtcgccatctcgcttaagctcgccggcaagcggctgctcttcatcaactcgcacctgtccggcctcctaccagagtctatttgggttttttcgcttgtctgaccatctctctttccttttgactcagagcggcgcatgcgtcgcgatccgacgtccggctgctcaacgtcgccaagatcaagtccgaactcagcatcgacgccttcctcgagtcgggcgaccaccgtacgctgctcgagggtaggtccgcttgcacgaaacccgcgacgtttttgacctcctgctgactccgaacccaatcttctagaccccaccgaccgttttgactcgaccttctggtgtggcgacctgaactacaggtgagtcgttcgctccttcttctcaagccagccccgctcacccactgctctcaactacaggctggacatcacccgactgcacgccgattggctcatgtcacgcaaaggttcgcagtcgccgacgatcagcggaaggcgttacggccagttgctgacgctcacatcccatttattagcctacgaggaggctttccagttcgatcagctgcgcaagatcatggaggagggccgtggcttcgagggcttcaaggaggcgccgatcgatttcccaccaacgtacgtcccttttgcgctgctgccgacggccccgacgccgctgacctcgtaccgtcctcgaccacgcgcccttcagctacaagtacgacctgttcaagcccatcaagcggtcaaacacaaagacggcgcggcggcggaagaacaagtcgctctccgaggtccaggaggacggcgttgccgaggaggacgacgacgagggccctgaggtcgacagctcatcaatcctctcgaccggctggacctcggtcggccagcaatcggactaccacagcgagatcgaggccgacctcgaggacgacgcggtagcgcctgagccggcctcgctcggccagcagtcgcagatgctcgcgggcaagatggtgtccgagaccaagaagctcttccttccaagcaccgtcctcaagggcaagcgcaagattctcagcctgatcaagccggcccaggcgagctcgtcttcgtcgccggcgacgccaaactcggccgagcgaagagggagcttgcccggtaacagcctctatggctcgtatcagtccaactcagtcacctcgctcgaactcgaccgcaaaaagtcggtcaagtcgcacgcgtcgtcatctggccaggccgttgctgggccgtcgagctcagccggtgcggcaacgacgccgagccgcaagtccctcgacagcaacaccggcggcgccgcctcaccgcctcggccggccattacccgacagctctcgtccaagcttcgacgctcattctctggccggctcgatctcggaggtccgagtccgagggatctcgcgtccgacgacgacaccgacgatgagaacgcggggccatcattcgagcggacgtcgggcctgacgagcgacgtctacgatacctcggctaaggcgagagtgccgagctgtaagtctttgcactctctggccgctcctcgatgatcttgcaggctgactctcggcttatctgacagggtgtgatcggatactgttcaagtcgttcgagagcgactatccatcaccacctccgcctcctccaccgccgcctacagacgacgggctagcggccccactcccctctcgactggaccgctttacgtcggccctcaacttacggaagcccggtcggctcaatcgctctgtctcggcatcgtcccagctctcgcacgtctcacactcgccaacggtcaacgagcggacgatgtacaagggtgcctcgacctcgtcctcgcagacgtcactccagcagcagcatcatcagccaacgccgacacgcacgcaatcggcatcgacgacgcagacgatctcagctgtcaatggcgccgcgccgcccctctcgccgtcggtcacccgaacagctcacgtccactggagtacgagctcggccccgatcgacggcgacgttccgcccgcgatgccctcgccctcgcgccagtcgagtctgagccgctacgtcctccgccagcggtcaaactcggcctcacacatgctcagcaacgaggctgacggaagcgcggccatcaagggcaaggcggcccttccgcacctcgatcttcacgtcacgactgatcttcgggagcccgcgcgcgtcagtacggccccggcctcaggcgattcgccgaagacgacgacgacgacaacctcggctgcgtctcccgaccggccaggtctcgccgctgagggccgccggttgtcggctccgccagcctccacatcgtcggcagcgggcggcgagaaccggtcgtcgtggttcactcggcttttgacgaccttcacgcacggcacgtcgagttcaacagaggacctgcctgcgacggcagccgaacagctcacgctgcctccgcgtgtcattcggcgcaagggcgaggttctcccgctgcattatggcacgctcgacgaccaggacatgcgcgttctcaagggtacgtctcggtggcagactccttgccttccttatcacgtctgacgatccgatctctgtctcctccaggctactcggatcaccggcccgtcatcggtgtctttgccatcttcatctaggcgctctggcagcagctggaatctcgtcacgccgcttttgctccggaagcatgtctcatcttcgccgggagctctacaggacggataagggcgagcgaacaggggatacagtagagagggcggttctttaaaccgtaaggggggccggggaggcagtctcgaaggcgcgcgggaaagcggcactttagaggacctcggcgaagaacctgttcaacttgccgaagatcatcgcaaagctgggcgcagagcagtgggaaggcgtgaatgtaagtctggcagcccagtgcgagcgacggtcaagagctgaaggcgtactccttgcggtccttctcctgcttgaggtcagcccgggcggcagcgaagccgtggtggaggtctgaaaggttgcgctgggcgatcagcaacggccggagcaagggcggtccgaatagcgtcgtgactgaccaggcaggtgctcgacgaacgccttgaagtccttcttctcgagcccctccttgatgacgttgaagacttccatgtcctcctcagccgtcgggtagagggcggtcgggaccgtcaggagggcgaggtcgtcctttgcaaagagcgaggggtggacgccggccttggccgcgaggttgggcgactggatgaggaccttggcgccccagcagaagcctggggtcgggtgagcggtcagtacaacgcgtgaagggaaggggcagggtagatcgagcctggccggcgtcacttaccgacagcgccgaccttctcggctccggcctctttggcggccgagacgacctcctcgagcttggccgcattggccgcgacctcggccttgccgccaggagcgaacatggcgccaatctcggccgacctagacgagtggagaggagcgggcttcagcacgagtctccttgtcgcgggagccagtctcgagcgcggtcgcacttctcgttagtcttgggctcagagaagaggctgccgtcggcggtccagccctggaagaagtcgggcagccagaccttgacgccctcggtctgggcgagcaggtcagcgccctgctgggcctgaggggtgacgccaaagatgtcgtaaacgtagaggacgaccttcttggccgacgaggggccgacgacgtacgtcttgaggccggcgatcgtctgggacgagcgggcaaagggacgtcagagaccgaccggcggacagcattggcggctaactcatgctcagccgacctaagacgtacctcgaacgagcccttgggcgtgtagtcggcctcgacgggaggcgacgtgcagcactctgggagggacgggcagcccgacgtcggcatcggcggtcagcgagcgatcgtcgcctggcgggctgtcgtcgtcgagctcgagcgtagcgctgaggtctcactgtcaacgagaccggacgacatggttcgagagaggctagtgtagggtagagtaaggaaaaggaggaggggacgttgacggttcggagtgaaggcgcctcgacggcttttgaagatgacgccccggcggagggcccggcctgcgccgacgacgctcctcggcacctttgccctttgccctggtcagcggcgcctaatttagctcctgcgaggatgcacgagcatgcacgacgaagcgtctcgtcaagacgggcaggcgtcgtccaaggtcgcctcgatggcttttccgctgcaggctgcagtttcgacgtcggcctgcttcctttccgacacgggccgcgacaaaatcataagaagggtcatgatgcaaccgtcaaaagcccgcggcgctacttgcgaatgttgagcgtcagcgtgtcgcccgaagcgaggttgatgcttgcgagcgtgctcttgttgttgagaaccttgccggcggccgtgtcgagccgcatcttcgagagcggtagcgtcgtctttgtcgcctcctggatgcgctcgcgcaggacgccgaccgtcaggtggaggccgatctggctcagactgaggaccgagccgtcgagttcgggcttgccggcgaccgtcggcagctgaatcgagagcgtgatcgggtacgggttgtacgcgagccactcggcctcggagacgacctggccgtccacacgagcacgcttggcgtcgggtccttcctggccgtcctcttcgcgaggccgcgtcgcaccgtactgctgcggcggtggcggcggcgcaaagccacctgccggcatgccgtagcctgacatccccggcggaggcggtgggggcggcgcgccgtagcccggcatgccatacggcgaaccgccggatgcgcccccaagcgcaagatctggcagctgcatcgccgccatccgcgaagggtgaattgctggcggcagggcggccgacggcacactcggcggcgcgggtaggctcgagtagctgcccatcggattcggcggcagcgacgacggcggctgcgggagggccgagatggtgcctgccgggccctgctcggccggtgcaggcttcgggaaagcggcaggaccgggaccgaccgggccagccgtgttttcgacggtcgcgacaccggccttcttgtggatggcggcaatctgctcgtcgaggttcgactgctgggcaaacttgttgagcgtcgtctccttcgaggcagtgtgaccgtcccagatgacacgctccttctccttgcgccgcgcgcgctcggcgtcctcctggagcttgcgcgcgtcctcgtcgagatcgttgccgaacatgtcggtccgcgcattggcaagctcgcggagcgaggccgagacgtcggcgccctgctggaggagcgccgcctgcgtccgccgggcgtcgagtcgctccttgttctccttccacttggggtcgagctgctcgatccgaatccggttcgcgacctcgtcgatcggcatctcctcgccgttgtgcatgaccatgacgactccaggcttcgactgcttagctgtggagggaaagtcgaagcgattcagaggtcagcgaggctggtcgttgagcgaggagaaagcgctctagggggacgcacacttcggcacgtaatccttgcgaatcttcatcgtgccctggctctcgacatacttgcgctgcatctcgcgtgcgcgctcctgagcgagctcagcctcagtcttctcgacgaccgccggctcggtctcgggctccggagcgtacgtcgctccgagcggctcgggctccttctcgagttgagcggactcgcgcttctgggtgagcgtccgcgactcgagctcgtcgaccgaggtcggcgccgggagcgagagcgtttcgtcggccgaggtaaagtcgatcgtctcgacgaggacaaagtcctgccagtcgacctgagcaaaggcgactgacgaaggcaagcaagaagaggacagtcagcgacgcggtcagacgaggtggacaccgaccgagcgaagggacgcactctcgcgagcctcgagctcgtccgcgcgcttcttgttgcgctccttgcgccacttctcccactcggcccgctcgcgcgcctgctcgagcgcgctcgcccggccctcccgcttccgcttgccgctctcgagctcggcgagcgccccctgcgttggtgctagcactcgctcatattggctgacgagccgctggaagagcgggtagagcgagtgcgtcggccggaggaagtcgaactggaagttgcggccctcgcgttgcgagagcgaggcgaggaacgagcgaccgcgtcgggcggtaaacaaggcggtgagtttgaggacgtcgaggtcaatgggcggcatgcctggccgctcgagcgcaaagtcgagctgcctcggctcctttggccggtcgtcggccgctgctcggcgggccgcctcgcccgtcaggtcggtctcagcaccacctgcgacgggcgccgaggcgtcgacgatcccttcccggagccgcgcctgggcgtagcgatagtaggttgagtacgggtcggacgagttgaggaaagagaacttggggtccgccttctggccctcgcggatcttggcctcgagcgaagccgggttggccgaccggtgtagagccgacgctgtccggtcgatgagagctggagatgcaagcagcggtcagccaacggcacactttagctgaaacaacagcaccgggcgagccaaggacgcactccggatctcgggcggcggatagatgagcgtcttcttgagacgctcgctctcggacaggttggcgtcgtcgacctcctcggccgccggcgccgcgccgccaacagggagatgctcctgctcgcgagcgttgaccggagccgggaggacgagcgacatggcggagggaacggtgtatgagtggtcgtgaagcactcgaggcggaggtcggcggtcgaccgggacgaccgcgcgccgcccgcgcggagagccagatgaaaagcgtgacaagacgacgaaaccgtctacggtcgaccggacgacgacgacgacgacgaccctctttcgaccttgcctgccttcgaccacgattgtcccgtccttcgcagcatgtttccgtcgtccgcccgcctcggtggtctgctctggtgcgtcgcttcggtgtccgccttgggtttccgagctttggtgagctgaccctcacgacctcctctcgtaggaagcgcaaccatgtcatgagcgactgccagaaggccaaccaccgccaacggctgaaggccgtcgacagcgtcatcgaggccatccggctctcgggcgtccagaccaagtccctcgtgcgtcctgtctcgtctatctggtcgcctggcgattgcgccgcggtctctcgtactcgcacacttgagcacttcgcccctgctctgaacgtcatgtcccgagctgaccagcctcgcccgttccctctcaacccccagaacgtttgcctcgccatgcccaaggagcacgagatgctgccagcgggtcagtaccttctctagagtaggcgttgctcccgccgatgtgacgtagagctgacctctgcttgcttccctccctcgcagacaagtacacgatcttctcgcgcaagcacgcccgctaccgcaagccgatgcactttgtgcccaagttcacgaaggtgcgaagagctctcgctccgttgtcgccgcttgctcgctcgacgctgacgggctggtcgtccccccccggttgtgggcaaagttttaagcggggacaaagagcaaattccggggggggggggcgacgagagagactcacgctgccatggcgagcctgagcctctagaaccgatgggtgaggatggcgcggagcttgacggcgtgcccgatgcgggtgacgccggagcgttctcgtcggcctgatagagacgaatcggaggtcagtacaaccggtgacaggcggtcaagtcaaaggcactacactcgcgtcatagaggtcgggcggcagtcgctcgttctcgatctagattggagagggaaggtcgagtcagcgcgagggagggagaagaagcagaggcgccggaacgcacatcgctgactcgagcctccttccagccgttgatcgcctcccgcgtcagttcggccccgtcgacgagacggtcggcctcgtcgccagctgcagtgcccgcgctcgtgtcgatccggagcgtcttgagctcggagctccgctcgctctcctcgcgcatcagcgagaagacgcggctcatgcgcccgaccgcgagaatcttgcccttgatcgccgcccgcttctcggccgacgtgccgtcagagtccgactcggacccggtcggcgacgacgaacgcttgatcgaggccgcgtcagggtcgaagagcgtgacgtcgtcatccgagggcgactcctcctctagctcttcggacgtgcaggtctgaaggatcgacacgagcactggtcgagacaagggtgtgggttagggtcagcgtcaagacagagggaggaagccggcgcagcgacgcgctcactctcggtgactgggcggcgaaggagggacaggtatgtcagcgcgagctcgaccggacgagattcatccgcaggattactcttttcgccgacaaacggcagcgaccacgtaaagacgtccataaagttgggcaaccagtacgggtgctgacttgcgttaaactggcggatgttgagcacgttggcctcgtgcttgaggacagcgcccttgttaccataaacgtcgaggtagttgggcgcggagaagactgaggcgaaagtggagcgctcaaggacggtcagctaatgcagtcgcgacggccgaacgacgaatggtgccgcactcgtcaggacgctcgggaagctgtgccgcgtcttgcgcatcatccggtagccctggtcctgcgcctcgtgcgcgcggatgaccgagaggaggttgttccgctcgagaaagtcggtgacggccttgtacgagtagtggaagctgcagccgcggacgctgttgtgaacgaagccattggccgagccgccggtcgcgttagcctcgtcgtcgaaatcgtcgagcgggtccgaccagagtaggtcgcagaagggtccgctcgtcggcggcctgcggggaggagaggcaagggtaagcacagggcaggagctcggcgtgcaaccggtcgaccggacgcactcgcggaagcggtcaatcgcgcggacgtcctcgagcgtgaagatctcggggctgaggccgccgtggacgcagagaaactgcttgttcatgacggctgcaagcggcaggcagcaaaacgactccatcgcggcctcgtagacacgctccgtgtacttgtgcttgcactctagcttgaatgtaaagtactgcgagccggcgagggggtgcaatgggtcagcggaaggaagatcaagcccggtgcaagggtcgtgtgcgacctacgtcggtcaggtgccggcactcgtggttgccccgcaggaggaaaaaggtcgacgggtagtggatcttgagcgcccagaggtagaggacgcactgcacaaggaggataatggtcagctctcatcgcgctcgcagctacctgacatcagagatgggtctgcacctcgatcgaatagtagccgcggtcgacgtagtcgcccaggaagaggtagcgcgtgtcggccgggttgccgccgacctcaaacagcttcatcaggtcgtagtactggccatggatgtcgccacagactgcaagagaacccagcctcagcgtttgagccagcagagcgccaaaccggtgaaacgcaccagtaaccggggactcgacgtcgagtaggttcggctcggcacgcagcagctcggctcccctgtgagaggcagcaagtcagcagcgttcgctgccatctacagcctccatccagccagcaagccgtcgagacgcactgttcgagcagccagagcgcctgctcctcggtcacgcgaccctcacgaaagaggtggtctttgaggaaggcgaggttcggcttgcgagcctcgtcgccgtcgacctctgggaggaagaactgctcgtcggtcggcagcgaagtggctggagatgcgacctaggacaattcgaagagcagcgaggtcaactgaggtgtgagatgccatggctggcgaggagaggaaggagggaagccgagcgagagacgcacccccttgacgaagctgcgcagcccgcgtgcgtgtttcagcgtcagcccagacccgaggagctcgagcgctgcaagccaggtaacggcaggcgccagacgtaccgctcagtcgtgtcgacgatggtcccatcctcgagcttgtgctgcgtgaggtcgatcttgggcgccggctgctccatccgcaaggcgatgcgggagagggcccgaccgtcaccgcgcgcgtggcacgagccgcgccacacagcgagaaacgccaaggcagagatgaaaggaaaagtggtcagctttggcgtaccagcgcgacgaccgccatgtggcggctgagctgggcggaaggccaacaggcaaggaggaaggcggccacgtaccatcgcgcctcgctggcggacagccgaggccgccttgagggcgtagacctgggtgctcggcggcggaccgttgggcaggtcgtcggacaaggcgacagcagcggcgatgctcatcttcatctctctgacgtatgagagggagagcgatggtggtggtggttggtggtcggtggcaagggctgagggtcggaaggaaaggcgaggaaggccggcgggcccgtcggagcagccagctgacaggtcgcgcgcgcgcgccaggctcgcgataaaggggctgagaccttattttatttcgaaactgagccggctggccgtcactcaactctctcgtccgtctcctcgtcccttcagcggccatcattcacgacccgtcctcaatgtcaagcagcacacacaagcgcgctctctgcaactcgtcctcaatagagtggctctgcgacgttcggccggccaaggtccgtgcgtcgccggaagagacacgcgagaccctgggctgaccctcctctcttccgaccggcctgcccttgatctgccgttgccccctcctcaggcggcccgcccaagtccactctcgcctgccgtccctaatcctcagcttggctcacccagagctcctcgctcctcgtcctccgttaagaccaagggcagagggcgcgagctccgtggctcctccgtggtcgacgagaacgcctcgccggcccgcagcaccagtctcgcggcagcacggcagccgtcgtcctcgtcgactcggccaggccagcaggcgctcggcttcaaggtcggcaagtcgacgccgctctcggagctgaaaaataccggcggtcggacgcctcgtcaagctgtcatcggactggaagctcccgggtacgcgagcaggccggcatcatctcggctgggtgtgcccgctgacgccttgtctaccgttcacagggcgtccaagggctacgagccgccgccatcgccgacgccgatcgtcagatccaggctgacgacaaaggagaaggcccagcagcgcgcgcaggagcagaagaagcgcgagctcgaggcccgggccgtcaaggagcgcgccaagacgggcggcggcctccggggctggctttcagccggatcagctggaggacccagcaaaagcaagtagacactcgctcggaggtctcctcttagtgacttttcctctcctcctccactccttcccttctcccattccgacggcccccggccagaccaaccaaagtccgcccaacctctcgcgctcaaccaatcttttgccttcgtccttctaactcagctccagacattcctttactgaaccctcagtcccgcatcgcgagcagccttacctcttcctaccgccgtctcttcctgcagctcacatcctcaccctcacgcccctccgtaccgctcgcgctaccgttcatccgttcgctcgcactcgtttctccgcgcttctactttcgcctgaccgcggtagaagggaagcggggcatgaattcgtggagagagaatggaccgggtccgcggcgtgtgcagtcatccgacggacgatcaagcgcttgagctcggcatcatgagcggcccagcgatctcgtctgccttagacttgccgagcaagagctcaatcagcttgagcgtgaaaacgatggccgtccccggcccgcgactcgtgacaagcttcttgtggacgacgacgtcggcctcctcgtacgcgaactcgtcgacgagctgagccttgaccgacgggtgagacgctgaggtaggaagtccacatcagcttcagcaaggattcaaggtgcaccagtaggggacgcactcagccggatcttcccctcgacccagctctcgcggccgccactcagccgggcctccttgaggacgatgggtgcagcgcagatgagtccgagcagacgcgagttcgcaaagaaatccttgacgagcgcgtggatgacgtgtgaggcggcaaaggtctgagcgccgggtatgccaccgggcaagacgaggagcgagaactgctggtagaggtccttctcctgcggagccgagaaggaggggggaggggagacaggtcagccccgcagacacgcagatcgcaagatgagctgccggccacgcactgggagatcctcgagccggccgtcgggaacgatccgaagcccacgcgagcaccggacgaaacgctcctcctccttcaggccaaccgaggcagtgacgacccggaggccggcgcggacgagcaggtcaaagacagtcgtgtactcgagctcttctgagccatgcgcgaggaggacgagtgcctgctgcgggacatctttttcggtagtcatgctgatgtcttgagggaatgggggtgcgagatgagatgtgagagctggggctgagggacgagggaggaggtcgatgtcggcagttaagtcgaggcgggccacgagatggccggccgacgtcactcaccttccgagctggcttgccctggatgacgaccctttctgactgctcccatactcctctgcagcatgtctctgaccgggacgaccgagtgcgtcctgcgctggtcgcgctataaagaggactgagcgagacggctgacatctcatctccgctgtcgcctcgctccgcagtgacaacctgggcaagcggccctcgcaggtcatcccggcctcgccgccgccgctctcgccctcgctcacgaacccagccgacccgtccgacgtcgaggcggcaacactccagcaccgccggccgagcgatatccaggactcggaatttgggcacgaggctgagcggccagcatatgacgacgcggtcgccgaagagttcgggggcgactacgatgccgaggctgctgccaactacaacgaggacgacgaggtgcgctcgctcaacttcctgcgcccaggatccgttactgacgctgcgttggattgactagggcgacgacggcgagctcgatattgacgaggcgggcaacggcgacccgcagttcgagagctatgacgaagcgctcgacgacgagcgcttcgacaccgaggaggcggccgcagagcaggccgaggcgttcgaaagcgactagggaatgcgcagactatgctgccaccaccccgaagccctcctagcgtctccgcatcgagggagagagaaagagcgcctgcgtcgcgcctgctgaccggcaggtcgcccgccgccctcgctgcagcgtcattgcgtcgaaacccttccgctcgagtgcactctccgttgcaaagctgcccggctgggcccggaggggatgtgcttgggcaagatcatgctacagataaaacgtcagtgcgcagtcgggaatgctcggcgagtcctgaaaggcacccctggcaagctgcccctgccgggtttgcgtcgcgaaagacaggcatgacattgcacgcgaaactaggggcgatctcatagcgggaggcccgagcatgaggtgagcgaggccggcaggctgcgggcggaggcgctctggaaaggcagccgaggcaaagctgcccgtcatgactccccccttgccggccgcctttcacagcccgctccccggctgcacgtagactggcgacggccttagccggcgttggatcagttcaggctcttagagcggttgtcgaccgggcccgaaggagcgctgcaccgagagggcgagaggctcgaggcacgagacttgggatgtggacgggaaagttgcgtaaggggggacgctcgagctcgtccgagcgttgttggagacgagaggggtagcgcaggccgacggaatcgacggagagaagtaggcgcggccgagaggaggtcggaaggcaggcagaatgagggtgaaggccgtgaaggtctcggtcgaacgagcagccggcgaccgtcgacctccgggcccaaaggctgtgagcgttcgcctcacttcttgccctcggcgtcggcgctgctgctcttgcaggcgatgatcttgagcttctcgcacgtgataacctcgccgcccgagccagacgagttggtctcgatcttcatcgtcggattgcggaggatgaaggtccagacgtcgtcaaggtggcggtacgtccggaggccgcccttgaacgtcgtcttggacttgacctgcttcgaaatcgtctcggccaggctcttgtcaaactgtcgtgcgaaggcaaggccggcagttcagcgcagggagcgaagggcgaggcggccgagatcgggacgaccggccgcacctggacgaggacccgcatcgccagctggggcgtgatctggcctgcttggaccgcttcgtcaagcgagtccgtcagacaaagtccgatgctggtaccgcggtagaattcgtagtagtgggtcatagacatgctgaagggaggcagaaggagaagaggagatgaaggtcagaggcgactgggcgcgagcggaggggctgctggagagagagcgggggccgatttcaaactccggtcatacgaagcactcgaacctcaactctgtcgacaggcggccaaaggaggggggtagcgaggctcgtcgtgcaaggcagaggcggcctgaaggaactgctactagtttctggctagtccgatctctctgacctcgcccgagaagaatgggtgaggtgtgtgcacttgcgcactcccgctaccatcaccctgaccctttgccggcttcgacccctgatttagcaacaccctgcagacctccaggagcagaggctttgtcgtcggcagactcgccagagtcatctttcaagcgacgcatacacacgatccgggttgtcgtttcctccggcagtctctgccccgcagcggtcacgctcaaccgacctttatacctaacccgggccccactgtcaattgcccgatcgacagtgcgcccagacactgccgaggatgatgctgaaggtcgtcagtattcccctctttcctgccctcggcctgctcctgcccggacgaagtgcgcacccaaacgctccctgagcgctctgcctcaatgccccccctgaacaaagacgagccgccgtgtcaaatgagttccatgatgagactgcgccggccgcacgtgcagtggtcaacgccggcaccgatgagtgtctgagccgcgctttgaagcgttggtcggcaggagtgggtgagtttagtagcgcatcgccgccggggccgtcggcggcagcggcgggccagtcagctgctggacgacgaggtcaatctcttcgcgacggccccgccatgagcccttggagtcgcgccgaatggcgacgaggccgccgaggacactcgaccggcgctccgactcatcgagcgccgccttctgctcctcgagcgcgcggttcagcgtcgtaaagatgtcctcgcacgactgcacgatctgagccgtggtcggcggaaggagtgccatccgctggcggaggctcgccgacttgacctcgatctgctgccggagcttggtgatgatctggatgaagtcgaggagaaggcgatcagcttaatcaagtgggcaaaagacaaggggagggaagaacggaccgaggtgtcctccatgaccgcagcgtcgaggacgtcgagcacgtcgaggacgaatccacggcgctcctcgatgccgacattgttccgctggaggacgttctcccaatcggcgacggcgtcctcggccttggcccgctgccggcgagccgtctcgagtgcctcttgctcgcggaggatagacttggcgagcgcggcaagggcgaggctccagtcggccggctcgcgggtgacgatcgtcagccgcgagtgctgggcgtcgaggtaggtgttgtcggcttgaagatcgaggatcaggcgtgccatctcggcgactgtcgtcggcaggttggccgggtcatcctcgccgccgccggcctggtggtggcccccgccgttgctgctggtggcgacgtgggcgggcaggccggaagcgaaggacgacggcgtgtggaaggccggagcggcagcagcgaccgaggccgctcggacttcgggcgagtgagagatctccgagtgatagccggccgggccgtgagcggggatcgagggctgatgcaggtactggccgccgccgccgctgccgctaggcgagacgtgggccgccaccgggtaaggctggccggtgagcgtggagacaggcacgggcgggagatggtcgcgcgaccgcctgcggcgcttccggtcgccaccgtcggccacccctccagcagccgcggcagctgccgccttattgcccggaccggggccgaagccttcgtacgtcaggagaaaacgctcggagggcgtcatgtcctcgtagcgcttctgcggcggtgcagccgcgccgtgcagagggtcagcgctcggcgtcgcagagaccgaccgaccgcgagacgaggccgctgccgggtagtaaggggccgatgaggcgccgatcgaagaagggtaggcactcgaagccgccacggcaactgctggcgaggggtgctgatggggcaggctatcgcgaccgggcctttcgacgggaccaccaggtccgccatgcgtccggtcgccgtggccagaatgagggacgatctcgatgtcgtcatcgtcgtcctctgcgagctcctccgcggtcggctcgtgctcctctggtccacgctcctcggcctttgtcgtcgcccagcgagggaggcccttaaacagaccgacgaccgagctcggcacgagacggccgacctcgttgcgcgcgaccttgagcgagccttgccagcccttccagacctcgcaatcgcgaccctcggcgtagcgcgtcggcaacgtgaccggctggtcgtcaagccattggatggcctcgccgacgactgacgggtcctcgaacgcaaggagcgcaaagcggtcggcgaccggcgggatcgaaaacatgtcgatggaggcgctggaaaagggaaggtcaagcttcaacctcttgcctgatcgaggaagggcatccgcaaccgtgactcgactcacagcttgccgaactggccgaaaaggacctcgagatcgttggcggtcgccgcctcggggaatctgcagcaacggaggtggtctggtcagcgaccgtcgagcacgagttgacaggcgtgcagactgacctggcgacgaagagggacccttcaggtgcggtgagcgagtcgtcgagcggtctcgcctgctcgccgtcgccctggacgagctcgcccgcttcggcaccctcgtccgggccattcgtcgggaccttccggctgagaaggacagggacgtcgccccctccgtccgagacacccggaagccggcctgcccggcgggcaaggaagctcgtcgtcgagccgctgacggccgtccggtcggcgagctcgttgccggcaattccaacgtggcccgggacccagacgagcgtcaccttgacgtctgggtgaagcgtcagcgtccgctcgagcgtcgacatgaagagctgcgactggtagcggatgcccgagtcgatgagcgtaatggccgcctgcgagtcggtaaagacgatgagctccgtcttgtccaacatgccgaccatcgagaaggcctcgagcgccttacggacgccgcccatctcggcgtcggtcggatcgcactggccgagctcctcgcggagcttggtcccgaccctgccccgggcggtgccgtcgatccgaacccactcaaccgcggcgccccaggcccagccgttcttcatcgaaccgtccgagtagaagatggcactcgtcgtcgccttttcgagcagccgcgcgtgaagagagatggcctcgagcttgctcgtcgcgatgaccttggtgatcggcaggttggaagggctcgtctcgacgagatggagccgcgtcatcaccccgccgacgaccttccaaacaggcgcgtgcagaatgtacttttcgtcctgatagagcgcccgccggagattgtccgagatgttagccgaccgcggcggcttgcggccctttggccctcgctgggcgttttgcgcgcgcgggccagacgggatcggcttggtcggccgaccctttgggccaggaggtgctgctgctgctgctgctgtcgcgggggcaggaccggaggggtgcgtctgcaccgggatcggcgacactaccgctggcgttggcagcgtcgggggcggtggcgccggaaagcccgatagaggaagggagggcggcggcatagcaaagccaaacgggttgggcggctgcggcccgaactggccgaggaagccggccggaggtggtgggggcgggccgaggccgagcaggtgcggcggcaggccggcaaagttgggcacgatccctggcggcggaggccgaaaggagcccgttggtggtggcggcggcggagggtgcgatgggaagccgccagcgggaaagccacccggtactggcgctcctgccaacgaagggaagtttggccgcgccggatcatactcttcctccaccgaggcctgtctgacgttgacagccggcgccggaagagagggtacgcccgggctaccctgctcttgcttgaccatcgtctgcgacagcagagaaggctggtccggggtgagggtcgtgttggcggcgggttggtcggccgagtcgtgagtcctgcaagacgcgacgggcgggagcacagagcaaagcgcgagtcgatggtcagcgatccgcacgatttgacgaaacggggacgtaagcatggaggggttgggcagccgaaaagagaggggggggggggggtccccccccgcgcggccttccgcctctattgctcctccgtgtgcctcggtcactgaccggacgctttcgttcccgccccccagctccccatcatggactctacgatccgcgagaccctccgcgtccacgcgccgatccactcgatcttccgcaaagttatctcggacatccccgtccctccgtcggtctcgtcgccctccgagtcgggcacgtacgtcatcccgaagggctactacgtcctggcctcgccaggcgtcgcccagatggacggccggatctgggacgatgcaggccgttgggagcccagccgctggaccgacaagagtggcgtcgcggccaaggcgggcgacgcgtacgacaatgacgaggccgacaaggtcgactatggctttggcggttcgtgtcccccttccttcctcccttccttcctttccttctgcccgctcctctctctctccctctccttgcagcgactgaccccctctccctcgtcgtcgacagccatctcaaagggcaccgagtcgccctaccagccgtttggcgccggccggcaccgctgcatcggcgagtcgtttgcttacgtccagctgtcgacgatcctcgcgtgctttgtccagaagatggagctcaagctcgagggcggcgtcccagagacaaactacgaggtccgcgccgtcgtcgtcccctcttgtcgctcgctcgtactgagttcgctcgctcgagagtttgctgacacaagcgtgcccgggttgtcactcctctcctgcacagtcgatgatcgtcttgcccaagcacccggacgagatcatgttccgccctcgggcctagaagcgcggttgtccgaatcgtccgaatcgcgcgcatgctcatgccaagggtcagagcgaaaggggaggaagagggaccaccgtctggtaggagggggtcgggggcgcagggcgtggcgaagcggaagggaaggtggtgcggatctgacggtggcggagacggagacgatataccccttgctttgacatttgctcttagtgctcgtctgtctgcgactcatgtgttgcgcccgtcaggctttgtagcgcaggccgccttcgtacgttcggagcggaggatgcctgccagcctgtccactacgtcacgcgacacttggccgcgcgataggtcagctattgagacggccttcacagccagacgatacctcctctgacccacccgagcagagatctctgacctcaggcgggttgtgcaggctgatgcgaggcgctgctgagcgcctcagtcagctgtcgagccgactccaaccttcgccaggccggcccaacgagtcagcgtctgagggcggtccccttcgagcgcccgtccatctccgccaatctcctactcgagtagtcaaacaacagcatgccatcgcccatctcgcctcgcctcctcagagcgcaatgcggaaggtgatgtaccggccctgccagtacgcagagcgggagaggagaggttggggcgtcagcagagagcgacctcgcgcgagctgaagcagccccgagggcaaaaggcgaaacccacggcggtttctgacggccgggtaatcttgacgacctggccgcgcgtcaggccgtagtagcgcgcaacggggtccgtcagcaatatacgcggaagctgggtctccctcagccggctgcgcgtgggcaggagcagcaagagaaggagagagagaggggccggatggtcagcaatggaaagcgcgtcagggaagaaaggggaaggccgccaggacgcactaccgctccagcaacgccttcttctcctcgagcgacaggacctcgtgccgcggcacgagctgatggtgggtaatgttgacgagcaggtccgcctcggcatactcctcgagcttgaagtcgcccgccatcgaggtgatgaccttgcgagcgggggggtcgggtggagagaaggtcggtcggtcagctcttgatcgagacggacggcctgaacagcggctggcgctgggcatgtgacggagcgtaccttgcgcgctggcggcgacatggcgtccgagaagatgatgattccccgacggatcttcttgtcttcaaggatgccgatgaacctgcggggcgggcgggcacgcaaaggcgaggatgagcccctctggtcacgaagagcgggtgggccgtctgggaggcggaggcgactaactttcgcatcgtcttgacgccgaccttgcgctcgtccgagtaaaagacaaagatgctgtcctcccggtcggtgacgctgtttgtccagaagttgagcgagttgcggctggcgcggcgacgcagaagatacagcaggctagtcagctcctggacgagctgcaaagggccggccgcgacggaagcacggcgggagagagcgagcgaacgacgcactcgaccgagccgttgggcgcgaagttgttgcggaactcctggtaggtcatcttcatctcgtcctcggcgacttggaaaccctgcggagagtcaaggaaacgagcggcagtcagcggccgagcgttttgggtctgcctgcgcgaaggagctcggacgaggcacgcacccggtcggaaacctggggaggagaggcatcaggcaagggagaaaggcggtcagtcagcttacaaatagacagctagggcgacatgctggacgaacgagctcatggatcgtcttattgacccggtagagccgggcaatctccctgtcgtccgacatggcgcgagggagcgggcggaggaggacggcgacggcggcggcggtcggggtggctgggctcggaagcggcggttgaagtcgagcagacgaggcgggctggatggggcgcgagaaggcgcgagctgggactgagcgaagagaagcagagagaatgaggttgcgaggcggcgagagcatccgtcctccttgcccctccgcctgcagagcgaaattcgcccgccgcgcgcgcgcgccgaagaggacgagctcgcgcgcgcgcaggaggaggttgcgagctaccaacgacgactccttccgacttgcagccatctctctttatcctccgcctcacgcatcaaagacatcgcatggagtctgtcgagaaggagtcgatcaaggacgtgaccgagggagccaaagaggccgccgtcggtgcgtccccctcagctccagatataggaggaaggtcgcgcgcgcgcgggagggctgaccagacgcccttgcctccgccatcgtcgagcatccagcgtccgacctgccggtcgtcaacgatgagcccgaggcaccgacctggacgtcgcgggcgtaccgctggctcctgatcggcggcttcgcctatatggccttccttgccctcctgctcgtgcccgtcattcagcgaaagtatgttcgtcgtcgccctcctcgggtggccggccgggatctgtccgactcgcccgcccagttcgctgatctcgctcgcccgaccgagcactctttcccagcgccatctttatgcacaatgtgcgcatcccgctctggaccaagtttgccgcgcccgagcggtacggcctcgcgccgtttaagacgcgcaacctcgctatcaccaccgccgacggcgagacgctaggcgcctggcacacgctgtccgtcccggcttgctgtcgctcagcacccaggtctccagctgatgaccgccctcgcttccctttccaggccaaacaccatctaccgcagccagctcgacggcaccttcccgccaacggcgccgtttgatgagggcgtctttgacgaggcgctgcgcgcccggccgaccgtcctcttccttcacggcaacgtacgcccacccgtctttcaactgctctccctgtctgcgccgtatctgacctcaccgccgccgccgctgctcctcaggccggcaaccgggccctctcgctccgaacgagcctcctctcgagcctttcaactgcgctcgacgtcaacgcgctcatcattgactaccgcggctttggcgactcaaccggctcgccgaccgaggctggcctcctgctcgacgcccgggccgcttgggactggatcgtcgctcgcaacggcggcgatgcgagcaaggtggctatcgttggccagagccttggcaccggcgttggcagcgcccttgccgcccagctgatcgcagagggtgcgtcctttcgagcgccgtccttccaaactgtactgcgggctgactcgaacctctcgctcctcgccagacatccacccgccggtggtcgcgctcctctcggccttctcgtcggtgcccgagctcctccggacgtactcgctcttccggctcttcccgatcctctcgcccatgcgggcgctcccgctcgcccaagcggccctcacctcgccccggctcctccagacgcgcttcgactcgctctcgacgctccgcgcgctgcccgcctcgtcgccgacgacgctcctcctcgcccacgcgcggaacgacggcgagattccgctcgcgcacggtcaggcgctctttgacggcttgctcgagacggcgctaggcggcggcggccggccgcgggcgagggcagactcgatgagcatcgaggcgatcgagctctaccggctcgagtgggatgcttggagggcgcgcgaggccgagaggacagagcgcaccgtcgtccctggctggggcgagatcaagcgctttgcccgcgccgacgacggcaagaccggccaggtcgtctttctcgaggcgctcgccggtggtcacgacagcctcggcggctccgagggcgtcgtcgcccttcttggtagcgtctgggccatctagctcggcttgtcggctgaggaggattgtatgactctggcaactgaagctgagcgggagaagtgggacgaggggctggtgaaggtgtcgagcggcaaagggagcgttcgagaggggccggtcttgcgcatggcaatgcctggcagtgggcagcgacaggttccatcaggagtcttccgtctccgagttgtccgagtcagagtcctcgttaagaacctcggcctcgtccgatgaggcaatgggcgaacccggaactatgtacatggatggattaaagactgtcggcgggggggactgcgtcagctagcccgctgaccctctctcacaatccaggtagtcgcacgcgggtggtcgagcggcgcgatgacctggccgaggccgtcctcgagcttgatatcgcggccgtcgtcgctgaggagtcgagcgagctcgcgcgcgtgcgctagatcgcgttcgatctagagggaggcgtcgggaatgaaggacgagagggtgacgacgcgcggctccaggtgggtaagaaagtcaagccaaaaggcagatggcatcttgttgtcgagccagtcaaagtgcgacacctctgccggtccatggccgtggagatcaatcatcgtgggctcggtaaggaggtacgagtcgagtctccggtcgggccagtcggtcacgagcgggagatggccggccatgtgatgggccacgccgagagcagtcagagccggacacttcgcggccactttaaggggcgatccccgatctcaatcggcgtagccgtggctgaagaggtgcagctgttggagactgagaccgacagcctctagaattgtctcgacatgctcgactttgaaagcgatcaggttgtaaacacgtagatcgacgagcgccggagaagagaaagcgccaagttagcaggccaaggcgcgtcctgattggcatcgatgtcgaggcgagtgacgagggagacgtcgaatcgggtgtcgaaggccgaacgaaggtggggttgaggacctcctcgcgtcgccggaccaatccaagtgagctgcaggacggttggccggcggcgactctggatggcttttcttggggtgacagtcgacggccagtgtaccgagacgactcgaagctcggggaggctcccgaggagatcgagtgcgtcatgcatgtcgaaacggaggtcgtcgagtgctcctgtagctctctcgagggccaagggtcgatgcagaagcgcgacgtgctggcaaggaggtcgggtcggcaggcgatgatcgagttgcggaagctggcgatctgcttcggtgaaggctggatgacgaaccgccgatagaggagagggccaacgatgacctgcgggccgggcggtggcgtcacgcatgatgagtgagaaaatccgcaggtcgtgcaagggaaagatagaggggtccgctcaccaaccaggcgcggcagacgagcagcaggacgtgcagacgcccttggttcataaaagattgcccggcgttcgtcgatcgtcggttggttggtgaccggctcaagcgtggcgagaatgatctcgcgctggatctcctccggcagctgcctgatcgaggtgaggcgctggcggtcggctctgcgaggttcgagcggcaggcacaggtcagacgagaccgggcaaggggcagaccagcccatcaggcacgtaaggcatggcggcagtcgacagatagctcgggctgctcaacttaagacggatcggagcgagggcaggccgaggacaggaaggcaagatggtcgtcaggaggacaggaggaggagacgccagctgcgcgcgtcttgcagcagactcgtgccgcagggcagcaggacgactcgatcactttgatcgccctctcgagctctctacgactgtcactcaagaatcgctgcttcccatcgtgcctagtgggccgtcctctcctccattcctcgacgtcgcctggggtaaggcgccgctcagcacgtgtcggtcggtcccgtcgcacaggccggaggcttcctgccctgcctccgacctcacctcgggcgctgacgagcacgattgccgaggatgtgtcagcttggccaacccgcctgacgagcagtgacgagatgctgacgagcagcgacgacgagacgtcgaagttgcctccgtcaagctcctgccgatactcgcggccgtgccagctggcagccgaactttggcggcttgctgacatgctgacggccgttcccagggttggtccgcccgactcagctcacccttcctcagcagcatgaccgagcgccgcccgtcgcaaggcctcacctgaggaggcagcagctcgaatactcataagggaggccggcaggcccatctcttctgcaatactatctcgcccatcctagactcgcccagtcctcctcctcttcaacccccaccaacctcccctgtcttaaccagcacctcccatctcatgtcctcctcttctgttctcgtcaccggcgcgaccggcaagcaaggcggcgccgtcatcaaagccctcctcactgccaagcacgccggctccatctttgccctcacgcgcaacgcgagctcggcagcggccaaggcgctgcccgaagccgtcactgttgtcgagggcgacctcgacgcgcccgaggccgtctttgaaaagcttgccggcaagcaggtcgacgtcgtcttttcgatccagcagccctggggcggccaggaggccaaggaggtgacgcagggcaaggtgcgttcctgtccgagctcgcaccaggtcataccagcgctttaagcgccgctcgaccgcctgcaggctctctttgactcggccgtcaagcacggcgtcaagcacttcgtctactcgtcggtcaaccggcacggtgagggcccgacgccgatcccgcatttcgccagcaaggccgaggttgagcagcacatcaaggccaatgccgccggcaagatcgactggacagttttccgccccacatgctttatggacaacttctcgaagcccggcgacccggccggagccttcctcggcgcctgcctcgaggtcggcctcgcaccaacgaccaagctccagtttatcagcgtcgccgacattggcaagctcgccgcgctcgccatccacgaccgggcgcgtttcgccggcaaggccgtcgacctcgtcggcgacgacctgacgtggctcgagatccagcagaccttccgtgaggctgccggcatcgaggcgccgacgatcccgggcttccagctggccaatgccgggcacgagatggggaccatgtgcgctcctccttgccgctttccttctcccctcgacgagccgctgactcactgctgctggcgcccaacaggatcaagtggttcgaggctgtcggctacgatgcctcgctcgacgagtcgcgcaagctcttccagcccgaggacttcgcgtcttacctccgccggacgcacgccaaggcggcctgaggaccttcctctcctccccgttgtacccctgcccgtccttcgtcgatcatgcccccttctccttcatgcttagcggcctcggtgtaacagacaaggatagatcgcagcgaattcctaccctgctcagcctcccttgcgcggctttttgggagctggcgccttccgcgagcgtgtcgtcatgcccagtgaccgcttgcgcggcggctcggccacacccgggtctgttgacgagagggtcgacgacagcgccgccgagggtggaacccagggcgccgcctgtgcattcaggacgggcctcgatgcccttctcgcagctgcggctgttgccggcgccgtagtcgtcgtcgagggtccagcctcggctggcgggaggccgatcaacttccacgccgacatcgagtcattggcgagcgtcgcgaacgagttgagcgacggctgcttctttgcgaggatcgacgggtcggccgagcgtgacgtgtgggcgtccatcggcgggagcgtaaagcggtcggcgtctggcagccgcttcggcgcccatttggtcggcgggtcggccttggggatggtcggcggcgctctcggcgcgcgcttgtacgagacgggaaccggcccacgacgcatcgacgaggcaatcttgagcggcggtgggccggccgccactggcgtcggagatgtcggggcctgcctcgtcgaccctagcggctgggacgagctgctgtcggccgcggcctttgggctgctgttcttgatgagctcggccgccgagacaaagccggccggtcgcgggcccgacttggtcgacttggcctcgttggtgatcttgacaagctgcgaagcgcgcgcgaagcctcctggctcctgctgactggccgacatcggtggcagcgcatactcgtcatcgcgggtcgaccagtagctgcgagagtaggtcaggcgaggaagtcagtccaggatcccgccacgctaccagaccggctgagcttcaacacgcacgacttgccgctccactcggccttcctcttcgctgcgagcgcctgcgtgaccgagatgccgtaccagccgtcgacgggctgcacggcgccaaccgcgagatggcgctccatcgcggccagaacgtccatatcgtccggcggcatgcggccgagaaacgagtgcaacgccaggcgcgatgcctcatcagcctttggcgggcgggcgaccgagatctgctcgcagcctctgctggatcagcaaaaagtcgccgccatccggtcgggcggagcaggactcacagttttgccgtcggcgagctttgcctttggatcgggtaggaagggcgaggcctgcggtggggaggtccactgtggtgagatacgcgggcgactgaacccctgcgcaggcactcaccttgcactcctttggcttgccgtcaaagccggccttgacctggtagtgcgtgacgtactgtgggtagcaaagacgtcagcgggaaggattgagactgacaagtgtgcgaggacaaacgaggagagcctcggcccgcgtagccgcgacgtagaagaggcgcctgcgcaggagggcaggagggtcagggtcagcctcctgctgaacgtcagggatggctgcaagacctcgcacctctcttcggcaacctgctctggcgtctctgccatgaaggacggcatcgtgccctcgacgactagaagcgacgcagcgtctgatcagttcgagcccgcagatgctgaggcacaagaggggacgtacgcgaagggacgaaaacgacgggccattcgagccccttggcctggtggatcgtcgacaagaggacggcctgtccagatggaggagatatgagcacgaaagttatgctcgcggccagcaacgctcggcacgtaccgacttgtcgccatcgtcggccgcctcggtcacgtcgctgatgagcgccgtctgctggaggaaccgctggagcggtgtcaggtcggcgagtgggatggccagctcatcggcttcgccccgagcgagggcctcctgctccttggcgagaacagcctcgaggctgcgctcggtcgatgcggcgaaggtttgctgtgggcgagcgatggagcgggtcagcttccaagagcgactgctgcaaggcaacggatgagtgcgcgatgctgaccatctcgaggacgttctgccacttgctgggatagtcaggctcggtccgctcgaggtgtccctggatgtcgacccgggccagaagcgtctcgatgagctccgtgacggccgcgccctggaggaagctccagagtgtcagccgagagtagcagcagcacaggtgacgacgcatagggcacccacagcatccgccttgctcttaagctcgtcatagacgccaacaaacgtgcggcaggcctcgaaggcaaggctgctctgggagaacggaatctggctgcctcgcaggacggcgatcgggctcagtttggacgcctggacggcctcgttgatgctctggagggcctgtcggatgtgaaaggaggtggagaaacgtcaggccgcccgatcgcaccgcgaaagctcgtgctcggagacgtacgacggcgccgaccctccgggcgggcacgttaatgattcgctcgaaagccggcagaaagttctcattctcgatgagctggaggtagccggtgactgcagagggaaggagaaccgccggtggtcagcatcaagtaggcagtcgagcgtcggttctgtcggggtccgcactgagcatgacctcggcccgctggaagaacttgcggccgttgagcacgcggctcgggatgccctccctggcgagggccgtctcgagcatgcgcgagtcggcattgtagcggaggaggatgcagacgtcggaccagctgaggccaaagccaaacttgacgcgcttgatctcctttgcgataaagccgacctcgatctcgcggtcggaaaactcgcgctggtagggcgtgctccaggcgccgcgcatcgggatcaacttcttctggatccgctcgacgtcctggttgatgatggccgtgccatagttgagaatgccgtcggtgcttcggtagttctgctcgagcaggatctggcgcgcgccggcaaagtcttgacgcatggtcgccaggttcttaacttgggccgagcgccagccgtagatcgactggtcggggtcgccgacgatcgtgattgcctggcgtgcaccggcgaggtgcttagcgagcaggtattggatcgtgttggtgtcctggaactcgtcgatgaaaacgtctgcagggcggcgaaagggtgggggagggggggagctgtagcgcgagagcagccgccgaagctgtgtgccagcgttaacttccatgaccatccgctccggctcgcgagcgacacccgtcttgtcgctggcacacagcttcggcggctgctctcgcgctacagcgatctgattcagacggccggcaacagcgaggcccagctcaacatgcgctccgtctacgagggcgcgagcgaggaggtcgactcgtgggccgtcttttgggagggcgagatcgtccggctcggcggatgcgaccggcgcggcatcgaactcgcaaagctccacgtcaagctgcaggtgcggcctcccgactggccttcaggcccctgtctgtcgtttatgctaaccactgtctctcgcccgcctcggcagctctcgcaccactggatctaccgcgcgtgccgcttcccgcagtcgccctggattaaaacgcccgaggagtgggagacggagcgtcgagcggcgctcgcggcatgccttggcctgagcgtcggcattctcaaccagatgctgatgctcccgcaggacgagatcctgctctacagcccagactcgacccacctcttctacgcctatggcaccttcatgtgtgaaaaggttcgcccgcttgcgtctgcctgtcatatttcgttcgccagacatgctgacgcccgatcacctgccagctcttccgcgcacgcctgctcgagacgcacgtcctcgacccggcctcgacgcagctcatctttgacgtcatccgggcgtcggccgaccggctcgacagcctgacgctctcgcccggctcggtcaccgccctgcatgccaccctcctacgttcgcttctccctgaaagtgacccaggctctagcgcgcgactcagcggtggtgtggcggccggaacgggtggccttcacgcggtctcccttccgaagggtccccagagcccacgtccgatatcgcccgcctcccaccagcaggcgtcaacctcgcagtggaccggcccgcctctgtctgctcagcagcagcagttgtctggtggaccgaccggcggccagcacaacgacgtcgtcgactttgcatcgttcggcgcgtcaagcggggccgacggcagcgcctgggagggtctcgaccaggaggcgctcgccgccctggcgacgcttgagagctcgctcgggaccttcaactgggaggaactcacgtactcgccgccctagcatactctctcctccttctgttagccggatcaacgatgactcattgacgaccgaactcgctgcacgaaggttcgctgcgcgagcgtggggacctcgacagatccttggtctgccttacgacgacaacgaccgcccgacctcgtgccccgacctccttgacacccaccagctctgaagcagatccctttgacaggcccgactcctcttccgcaactaaaggagcgtctacatgtgccggctcgtgcgtcccgccgcttcagtcagcctgccctgcgccatccgggctgataccctccgacgagctcgcttccggccccgctcgtctctcgcaggtcgtctacaagggtgcgtcgcgccttgcgatggtcactctgaccggcacgatcgctcacacggactctcacgcccccaggccaggaccctatcctcctctcgcacgtgaggctttgatccgcttgaggagcaagatggccgcacgcctcccgctctgctgacgctcacgcttcgcgaccctacgaggacgcccagctcctcactcgaccgtatgtacagctgcgggcaaagtactgctagacaagatctgataccgtctactcactggctcatgcagagcccactccatcatcaatcaggcgttcgcgtccaagctgcggctcgacctgacgcgaggacccatcgtacgtgctgctgtcaatttccggatcctctcaggccgctggctgacttaaattagcggccgcctcccagaatggcgacggctttggctgcgcatggtacgacctgcccgatacgcaggcggccgaggacatggaccgcggcgagggcaagggcgccaacaaggccgaggaggtcagcccctgcgtctttaatgccatcacgcccgtacgtcgcgacgcttctgccagatcgccgccttgagccacgagctgacgactcctgactcgccctggcaggcttggaacaatgagaacctccgtaggctcgccgacaaagtgcggtcgccgctcatcttgtgtgtccttgctgagagctcgccttttcgacgttggctcgcactactaatctctcaataatgccaacgcacagcgcgcacgtccgcgcaagcacctctggcgctttgagcgagcagaactgccatccttggagcttcggcaggttcaccgtgcggcccgcgcgctcctttatgcttcacttgaccggcgctgacctctgcccctgcttcggacactcttgttgtcatgcctcaatcactcagtggatgcacaacggcggcatcgcgtccttctcggccatcaagcggcgcctgcagaatgcactgccagaggcgctcttcctcttcccccagggctcgaccgactcagagtggtgctttgcgctcttcctctcgttcctcccggccggcagtctcgatggagcgaccgtcggctgggaggtgctcaaggacggcatgctccggacgatcgaccagatcaacacgtggaccgaagaggtcggggccgagccgagtctcatgaacttttgcgtgacagacggcgagagcgttgtcgcgagtaggtgcgtcgccggtcgcttgagttggctcccggctagctcaagactgaccctcccttcctctctcattcagatacgtcagctcaaagactcaggaggcagcgtcgctcttcttctcatcaggcgcctcgtttgtgggtgcctgcgaggccatcaccgagctgaggaccgactgacccacccaaccgccgtcctgtaccagagcgccgacccggacacgccgtcgctctatcacatcccaccgtcgtcctcgccgccggatccgctcgtcctgattgcgtcggaaccattgacgtttgagcgctcagactggaccgaggtccacaccaactcgctcattgtcgtcaccggccgcatgaatgtcctccagattccgatccgcgacaagtacgccgacgacggcacggcaggcggcgagggccgtggccgggcgctcgttcgcggctggggactcgccactggctatgcggatgaggagggcaagaccgacggggccgaggacaacaagctgccccgaacgatcgagctggacggtcgcaaggtcgaggtgacggcctgagccgtcgtgtagaaaggttatcccctgttgtgtttttgtaccatgccgctgcaagtctgtctgctgagtctgcgttcgaagtgcacccaccgcctgtcgccggatcgcacgactggcctggctgcgcccccttcgacaccacccgtccttcgactcgcctgtgctatacatagactgagtcccctgtcagacaacagacacacgcgtgccccccactcttcatcggtcggcagctgttgcttgccgcgcagcgtcgcttcatcgtggcccctttagcgcccttcgcggcctcctccgacgtcgaccctcggcttcaaccggccttccccttccagccaacgctccgaaagggcaaaatctcgacactcttcctcaagagggaggagagctgacctgagcagccactgccattcttcgcccccttcctgtctcctcgcgccatgtcgcccgacttgccccaaggcccgctccacgtcgagacgccgctcgtccatgtccccttcctctcccaaggcaagcacaacgtcttcatcaaggatgagacgcagcagctctctggcagcttcaagatgcgtggcatcggtcacgcctgcctgatggcgagacagaagctcgggccagacgtccacatcgtcgtcgcgtcaggtgcgtgcgaccatcgaaagctaggcctgccggccgctctcgcaggaggtcctgaacgtctgctgctcaacctccggctgtccctctcaggcggcaatgctggtctcgccgctgccaaagcaactcagctgctcggtgtacggtacacgggtgagcgagactttcgcctgagctcgccttgctggcctctcgcgctaactcgtcatcgaccgcaatctcgacagtttttgtccattcgacgaccgagcaggtcatcctcgacaagctgcgctcgctcggggctgaggtcagaatcgagcctcgctgggaggagtgcaacgaagctgcggtcgccctcgcaaaggaacgccccgaggccatctacatccaccctttcattggccaggacgtcgtccgcgggcacacgtcggtggtccgcgagatcatggagcagttcccggccgtcgcacggcaggccagcatcgaggctgtcgaacccgacgtcctctgctgctccatcggcggaggcggcttcgtccagggcatcatgctcgggctgactgagcacgccaagcgctcaacatctccggccaagcacgttctggccgtctgcacaatcggcgccgactcgttcactcgcagcctcgagactgacgatgagttcatcaagctcgaggacgcgcactcgaaggcgctgagcctccggtgtgaggcgtgctcgccgatagcggtccaagacgcgcggaggtacgcctcaaccggttcagtcgtcggtgccgacctctcaacaaagggcaaggctggccgctacctaacggtcgtccgtgctccagacgactatgccggagcagcctcgtggcagtacaggcgagacagctccgcacacacagagctcgagctcggctgcggcgcggcgctcagtacgtctaatgccaaccttccgtaacgagagtccctcgatactgaccgatttcttgccggctccagtccctggataccagcagtcgatcctcgacttcactcggggcaagctcttccctgatgatgagctagaccacaggaggctgaatgttgtcctcgtcgcttgcggcgggagcagagtctgtgccgccgacgtcgaccgctttgagcgcgactatggcctgggctcggggaccatctttgtcgatggcaagtcgatatagcactctgccactgtgccttaatgtgtatgacaattgagctggttactcagcgactgggggcgactgggtacaaggggcgaaggtcgatgggccgctgcgcggacgccgacctccgggctcgagaagcgggacgccgcaagaagagagagcgtccctccgaacccccaccgccaggccgccatggaaggctcgacgacggagagcgtcgtccatcgcctgctcgaaggcgatccctacctccagtacaagtgcgtccgaccctggatggcgactcgggaaggctgtgaccctcctgccgtcagccgcctgctgtccccagctcgcgaggttgactccgtgctattgctctcctccgccctggcttcggccgctaccttctcgccgcctgctctcttgccgcttccagaccgtaagtggacagcgaagtcggcttgacatgcacgcgtcgtcgccttgtcgctgacgtcccgctcgtgttcctccaccgcaccaggggcttcgcctactcttacgcgacgcagctgacgatcaacggtgtcatcctctcgcttctcgtcgtcctcctcatccacctgctgttcacggccccttcgcactatgcgctcgcccggctcaacttcttgctccagttctcgggcgtcctcgtcacgctcatcgccgtcgcggcgacgatcggcgtcatcctgtcgaccggcagccgcgagacaaacttctggccgtatacgaccgactttatctacgtcgacatgccgccgagccgttggaacacgggcgaactcgttctctggtacacgatggaggccatctcgagcggcattgtccaggtgcgaagcctgctctccgatggcgcgccgctccgttcggccgctgacggcccacccttgcttgccagatcacccacattcagtttctcacgctcctctacccttccgacctcgaggctcgactcatctttggcctccttggtgggtgtcgagtaaattgcgtgagaactcgccgacctaaactgacttacactcaccgctcagggccgattgcgctcgcctcgtcggcgacgacctttgccgccctctcttcgtccgagtcatcgatccgggccggccttatcgcccgaaacatcttcaactcgacgctcaccctcctcttcacctcggccctctttatctgggggctctatatcaatcggcgccgggcttggcggaccgatggcggcacggccgcatttggcgcgggcgcgctcgtcctcgctgttggaggcacggccgtcaactttctcgaggtcaaggtcgacgggctcgagtggctcaaccacctgctttgggccatcatcctctggcagagctgggtcggctggtggtggtgggtcggcgccggcatgggcatcggcgaggtcgaggtcggtcgccccgggcctgcttgtgtgctgctctgatggccgcattggctgacaaagtcagcgccttctttttaaacaggatttgatggagaaggagcacaggcgcgctcgcaaagctcaagcccggaagctcaaggccgagcagcggcttgcggccaaagtcgcccgctcaacctcgtccggcgccgagggcgaaggcggcaccggtcccaatggaggcgggcgagggagtgcgagcggctcgtcgaccatcggccggcgaatgaacgagctcgcgggcggcctcagccgacggacaacgcggcggacgacgacaagccggatcgggcaaggcgaacaggtcgagctgagcgacctccgtgagcgacggatcgagcgcgaaagtatgcggcaacagcagcttcaggaggagcggcccaggccaagctttgagcagccgccgctcggtgaccgcgaggcgacgctcccccttccagcgacggctgccggcgctgccccccctcttgccatcggagtcgtcggtgccgcaactggctcagccgtgtcgacctcgtcgccgacctcgtcctcgtcctcgccctcgctgccacccgcgccgtcgtcaatgccagccctgtttggctacccgtacgccatctcggtctacgtcttgtcacggcttgcgcgcgcccacgacgaggcgaccaaggcgcgggtgcacaaggtccggcgcgctagcggccggtcggatggcgcgaaggcgaacggcatccctgagcgacgcggctggggactcggcgagtttggcgtcgaggaggtccggggtggggaggaccggctgcgggatgcgcagcgcgagctgagggctggccgtttgctcggcggagacgaggacgccgacgacgaggacgacgccggggccgaatgggtcgacgaggaggtcatccggcctgctcgacgagcaaggcggctctcgcgcaggagccagacgaggtccgagcggcgagcagagcggtcgaacgacgacatcgactcagggtggagctggtggggaccgctgcgtgagttgagctgctcgccgggccaccttgagccatcggaggatgctgacacctgactccctcactccatctggcaggccgatggcgcctgcaggatcggaccgagtacatatgaggctcaattcccggtcctgccgcctcaaggacgatttcgactcggcaaacggatccgcccccgaccacatggtaccataagtgcacgtccgcccgccagtgacctcgccgcgcgagctcggcttcggcgtgccatctccttgccgtcctatcccggcaaagatcggtcagccggcagggtaggcattcgcctcggaaggcctttgcccagaccatcctctcggcgaccacagatggcgccgctcttacctgctggagtgcgcgtcccgagtccgtcgaccctcccggacgccgtcgtggacagctcacgcctgtcgacccctcgcatgttgtattcaccatcgatcctacactagactggctatccctctgctcgaccgaatttgtatccaaaaatgaagctgccgcgttgattctgccgagccctaatgacagtgcgcacccggacctggtcccgctgccgctctcggctccgttctgaccgcgatcctggagtctgctcccctgcagccgatcctcctgcctggcgtcttcctgcctcgaggctgtcttgccagctgccactgccgcctgttcggtcggtcaagtaacactgagagagcgatcaaaagcacgcgctgcggccgcacgcacgcgccgcgggtcttttcgccctgccgcccttgcgccttgacgttcgcctgcctgccctgcttgcctctgcctccgaccccatcccacgccccttcttgccccttgacgaccgccagcagcagcagcagcagcagcagccgttctcttcctctcttctctcgcccggcacttcatctcgccgtcagatcagcgcttgacggccccgggccatcgctgccggcgcaaccgcccctcctccttcgcgcccaccgcccggcgggcagcagcagacagcagcgcgccagcgcgcaagccgaaccttcgctcagggacccagctcatcgttctccggtgtagtatctctccccaggtccagccgccaccgttctctcggcacggcccctccttccgactcccaagccgactcgttgtcgatgtcgcacctctttggccgctcggccaacggcctccatcaccacaaggctcgccgttcgccgctgccgttcaaccacacgggctcagcggccctcaacgagaagctgctgagcgagagcgacggtgcagagtcgtcctacacgctcctctttctccctttgcccttctcgaacccgcggcgaaagcttcggctcgtcttgcccatacccccaagagtcacacgccggctcctccgaccgcgggcgctgctcgtgttcttcggcgccgttgcgattctgtttctcctgctcggccgaggcggcggccgcaaggtggtcgacagcggcagcccaaaaaagtcggtctggcagaaccccttctcgctcgacacaaatgtattcagtcgcgaagagctccggagcatctgggagtgggaggtgatgagcggccactatccgagcgcgcgcaaaggtcgggtcgtccgcttcgctgtcgcccgagcttgcagtcgtgctgaagaccttgtcttctcccccactaaccagcacctcaatccggcttgccgcacggatacgtcaacccgtctgtgccgttccggccggccaacatgaccgagggctcagccgatgtcgagcactaccttcgaggcgctggccctaagcggcagtacgtcgacctctcgctcccgagcgaccctaagcgcgatgccgttctcgccttcccaaagcggccggtgccgggcagcgcggccgaccttgacatcatccacgacaactgcgacttctcgcgcaatcacgtcagtccctgtgcgcagccttggccagcccgggagaagcctgtactgactcctcgcctcgctcgctttgcagtacgtccgcgactgcctcgaggtcctccgcatcggcggcggactcgacaacggccggcgcatcaagcgcggcgacctctcgccctggtcgtacgtctacactgagcagttttctgacgcgatcccatccgacgaggaggcctcgcagcgggcccagctcgtgctcggcatcaagtcggtcgacgagcccgggtcggcaaagggcgagcgtgcccggccggcactcgccctccctccgccctacccgccccgaccgccgatgccgacagccgaagagccctgcgatccgaatcggccgcggctgttccacatcttttgggcgggcgagtttaccgacaagccctacatggccatcatgtcgttcctctacacacagaacctcggcctcgaccggccgccgaacgaggggccctcggctcgggcggccgagccgccggtctgccggccccaattccacgtctggatcaacccgggcgcggcatcctcggtgccggacccgtcggcgaagcgtaagatgtacgagggactcgcgaccaacccgtggtcggcgccgttcctccacccgcgcttccaggagattgtcaagttccggctgtggaacacgaccgagcagctcgacggcgtgcccgagctccgcgatcactggcgcgagcggcttcacctaaagccggccgcggtcgacgacagtgccgacggaggcggcctgacgggcgccgctgctgcggtcgaggaggccctcagcgacgaggagctcctgcgcgaagtgatcgcccaggccgctgccgacgttcggcggccaaaggcggttaaagccaaggtggcgaaagtcgccgaaaaggtctcgctcggggccaaaaaggaggactatgacaagctgtcgaccgtcctgtcggacatggtccgctttgtcctgctccatcggttcggcggcgtctacctcgacgccgacacgctgttgctccgcgactgggaggagctctggaactggcgcggcgcctgggcctaccgatggtcaaagcacgacaagtacaacacggccctgatcaagatgcacaagggctcggccctgacgagcttcatctttaagacggcgctcgagaacgacatggatttccatccgatgcacatctcgcgctacctcaccgacgccgggctcgacccgcttctctaccgcatctccgactatgtcctcgacgccgcctggatcaacatggagggcttccagcgcgaccggccgccgttcccgcattttgacgagtgcggccctccctcttcgcagtgtgctgcttgagatccccgctaacgacccaagcgcccccccccccccaggttcgaagagttcttccagggcaagcgcaaggatacggccgcgccccaggcggccggctacgacgcctttttccggggctcgtttgcctaccactggcacaacaactggtggtacccgtttgatccggcccgcaactggcccgacctcggccagcgtttcatccgcggcgagcggctcctccgcgaggcgattgcagcgagcaaagcgcccgccgctgcgcccgaggccgacgggccgatcgacacggccgccgtcgcggcgcgcgagccgatcaagcaaacgcctccgcgcaaggtcgaggatgggatcgacgacgacgagcgcgacctcagctggagtacggtcgtcaagcggacgatggagggcttcatccggggcgagcggcccaaccagtatggcgagtggatcaactgggtgcgtctgcttgatctccaccacggttcaaacgagagactgacccttttgccctcttgcaggactgagccgatccctctgcattcgtgctctctttcctagatgtcgcttcccatctctccttctgtcattctctctcgcccccttatacccccccccagctcacccacccccgcagctgaccttcctcgctcggccgacgcctcggaaaagacctgacgacaggagagataggaggcagaccggccaactttcacatccctccttttcccctcgcgacctgttgcccgactcctcctctctcctcgccgaggggtgacgagacctgcccagccggcctagggagcgaaagggagtctctagcatcccctctcttatcctgcgatctgacttaggcccgacggccttcctccggcgcagtaggaggagcgacgagggaggaggaaggtgtcgagaaggtagcagcgatcgatgatatcttaaccacccctcgtcctcgcctcgcctcggccgggtcctcctcccacccaccacgcatgacgtccgctccggctctcctttatctcggcccgctgctgacgaggctttaccccgcaggccgggtacttcgtcggacgctttcgtccggccggtcaggcgtgcgtgcctgctcgctgacggccgacggctgacctcttgctggcctccgcctcgaaagtcgtcatctgtcgcccgggtcggtctcaacctctcgtccgcaaccatcgaaacgtcgcctcgtcgtccagctcccgtcctcggaaagaggctctcggacgcaggcgcgcagggcgtcatcgtccgtcccggcccggcgcgacagacgaacgcggccgggtttttcgtcccttcgccccggcgctcggctccttcgcttctgcacgaccggcaaccgaccagttggtgacggcaaggctcgtccgacgtctgtcggtcggcgagctgatgatgacgcgtgcatgcatgcaggcggaggagccgacctcgacgcgtctcttgcaagggggtggagcgtcgcctcgccattgctgactatcctctttgttgccaacaactaagctcggtttccgtcctgcccgtcccccgccgtcgacccctttaagcccagtcggtgccgtgcaaagcgccgacttgcctgctgccggtcggccggtcggtcgaacgtcgcagctgactggctggccgagtgggtctccagacgagccctcgcgcaacgctcacctctcgacgaacacacacgcacgcgcaggacgggcaggccgagagcgagcacgacgaagatgcgcgctggacgcttacgtcgcgaggccgctggggtggtctgtgactggctctgcggcttacaatccggccaggctgcgttacttctctcccatgatcatgcctcctcagacgtcggcgagtcagctgcaggtcaagtgttagctatcagtcggagggcaggcaacaagtcggtcaaaggcaactcgaaagcgacggggggaggcgggtcggcgacgcgggcagcagcaggcgacgcgttcttcgagtcgtgcaagggcggctcccgattgcatttctgcttgagagagcgcgaaggactcgcctttgtgacatcctgtgggtagcgcggcaggaggacggtcgtgtcggtcaatccgggtctccatacgggttcagccgcaggtcgtctgagacggacaggcatggcatcgcacgcctgcgaagacagacaccgctcagaaggagctatacccgtcgtcgtcgtcgtcgtcagcatagctcccgtcgtcaacgtcggcgtcggcggcgtcattgttgctaccttcgacgccgtcgtcgttgtcctgctcgcagacctcctcgaagacgggctccccgcggcgtactcatcgtcgtcgtgctccgacgcgatagcgagtccgttcatagcctcagcctcgaagtctgactcggcgggcccaaggttgagcggttggtcgatggcgttatggtcgctcgagtgtcgggtgctcgagtcgccgtcgcaatagtcgttgatgttggtgtcgtagaagttgacgaatgcgcttatctcggctgcagagtaacgaacaacagcgggtggattggcagccctcgacgccaaggcgttgcagatggccgagacgcagacacgcctgatgacagaggccagaatgctgtcttggagcattctgactcgccatggcaagccagcgattagcatcgacaactaaaagggggttcgtcatttcaggaccagcggacctcatctggttgcaagccgagaatacgagattcaggagggacgtacgtaggggcgcgccccgtcgaatcgctggcggccggcccttagaatctcctcctggcgacccaaggtgttttcaagtaggcttaggagcgaatggaccctgccgggctgaccatacggacgacgagtaagatgaagcggttatccttgagcttgaagcaaaggcggtcggccctctgcccagtttgggcgtcgaacagttgcaggagaaaggaggctcagccggatgctttgaaacaggcttccgggcgagagtagagacgcccctcgtaactggtgtaaaggttggggtccacgctcatgtgccttgtccacgagtcgcgagccgacgcctcaatcttggccgcccagtatcgcgagactgtcgcgacaggcgcgagcgcaagctgaggtcaaaggggtcagcgacagccagctccaaagctcgacctgcggcgcaaagacggaacttgtcgaacctcacgccagagccagactacttggccaccgcggaatatcgagccgtcgtggggagaaacagcgatggcctcgcagaggacgaggtcgccgagctcgggcgggagggtgaactgctggggcagctgacgagctcgaggggcgctgatgcaagtcgcacaaaggaacggataagatgcagagcgtcagcagagcccgttccaagaagggagttggtctccttgcacctggtaccaagagcggtctgctgaagggcgagctggccggccaggccgaacgtcggctgcatgccggctgcgcgctgagcttgcgcggcgggaggagggtagcgggcggctcggcggttgggcagtgagtagtagccgtacatgctggcgctgatactggaagcgaccgagtcaggagggtgatgttatggcgagaaaggcagcaatggctccagaggcgtacagaagggcgtcgcgccaggcgcggcgatgaaaggggctcgacgcaagcggcccgcgctcgctcttgcactctcgcggtctcgacccgacaggcgggcttacggacgaccctcagcgatgaacggcgggccaaggataggaaacgtttccgtaggaggggtatcaaggtgccatggaatgcttgccttggaccgtgtcgcttgggttgtctccccccctcatcccctccttcctgcccccccggctggcccgtagatcggacgtctcagttggtcgtctaacccatcttcttggccttcacgcgacagaggtccgagatgagcttccaccagggaatgcagacccagagtatccaatctactgggttgagctcttcgccgctcagccgcaagtgattgagagcgtgcatatagaggcagacggacggcatgggatatctagacggccgcgcgactgacgagacgagacgagtctagatacaaagcggccgcgtcagaagcgtgaggggagagagaggagacgatcacaaaaagcaaaggacggcagagatctggggccagaagcaggtcgcgatatgaggactcgctggtcgcgggcgatgccctagacgtcctgcgactcgtccgttaccttctttgacttggtccgacgtttctttggcaggagctcggtgctgcgacggcaagggtggaaagacgggcggaaggatgatgtcagcaagtcagcgacgacatacgatcacaacaatccgcagcagaacgcacgcaatgtgggacaagacgccgccctccaaatgatggtgctgttgagtagcttgttgagctcctcgtcgttccgaatcgccagctgcaggtggcgcggggtgatgcggcgcttcttgttgtcctgcgcaacggtaccggcgagctcgcagacctcggcgacgaggtctgagcgagcgccggagacagcagagagagcgaaggtcatcagagctatgattgaaggacgggacggccgatggcccctgcgcatgcgcaggattgggcaaaccgaaaatccgagaatcgcagcgaggtagaccggcgcgccggcacccacacgctgggtgtagttgccctccttgagcagaaggtggacacgaccgacggcacgccctacttggccgaggacgaatactcggtaaccgacttggtgccctcggagatggcgtgctttgagagctcgccggggaggatgaggcggacggccgtctggatctcgtgcgattctgaaagtcagttcacatcacgggcaggaaccagacaagggcagcaagaaagcgaccttgaggtccttgccgcagaagcgctcgtggttgtgctgggtgaggtggatcttgaccttaaggtgtaacctatcgtcgttcgaacgagccaacgccaaggcgtgctcaaatggcaaggcatcctcgtcgtcgccgacggcccgagcgcggatgcgtacgacgccggcacctgatgcctctggacggctcactttagaacggcagtcgtcgttacagcatcaggcaaatcctctcttgcagcgcgtcggtccgagcctcggcacacgtgtcctttgccaaacggccgtcgcaagcgcgctcttgcgacggtgcgcatctcgatccacaagacctagcgccactcttccaggcaaggcaagttagctgcgtgagccttccaagcgagcgaaaggccgcgagtcgagacgtctgctgcagacgcaagcctctgcgagtcgcatccgacccacccgcgggcgcgcgatagacaacgcgtcgcactcgtgtggctggtcatacaatcctccacgtccgtggcagggcaagagagtagaggtcggtctattcagacgtagactgcaagcaaggagcgagcgtcagacgcgatggctgggtgatgaagagagcgcaggccgactgaccatgtgcgagtgcgtacgcgccgatccagcacagtaggaatgcaagcagtccgtcctggtcgatgccgagcgccatccagccgccgacaaagtactttttcggctcgcccttgcacttgccgaggccgacgccgagggcaatcaggctgaccatcgcgaggtagacggcaaagcccgagaggccctggaagccgagcagaccgcagagcgagccgagcacgagcgacgtgatcgtccgtagcgttgccagctggttctgcgagaagcaggcgggcagaagagggcgcaagaaggtcagccgtctgtctctgcaaggcaaggcagtcttgtccttcgacgacgtacgagctgctcggcgtagaagaagggcgtctgaagccggacgccggcagtcgtctctgcgggcggcggtccgacgggcgcctgagcgccggctgcgagcatctccatcctgggcgcggtctataaggtgctgaagtagagcaaagggtccggcttggagctcgagaggcaggaggtaggcaagaaggggcggcagggcgagatggtgtcggaggtgagagggcggagcgagcccgcagccgaccttgcccctcaacctcgacgatctcttgccggccagaccggctcaagcagcaccttagacgccagtcgggtccactcgctctcactggtacgtctggcccgccgctgctcagagactcgtgaagcacgactgagaggcgcgaggctgatgcttggccgactgcttcccctctggctcgcaggcctcctcgcccacccggctcgccctagtcctcgcactctcgcctcctgaactacagttcaaagccggccctcttctgagaccatcgtcgtccgtcgtaacaggtgagctggattcagctcttcgtcagcaactttgactctcatcctgaatggctcgctctccctcgggccctcgcaggcttcctccgcaggcctcctccgtcgctgcctcttgctcggaccatctttgagctcctgctcgccagcccgcccttcgaccgcctcagttgccgacataagtccgatgagcacgaccgcagacatcgtccagacgttgatcgaatttggcatcgagcccggtgcggaagcagctctcactgcagcctctgtctgccaacgctgacctgccaggggtacctcttgcagacaaggcgaagcatgcggccgccaggtactcagatgctgagcgcgccctgaactggtgcttcgaagcggtgcgtcgctcggagcccagagatggctcactttggctctcgcggaatcctgataggctccctcgtctctcgacgcgcagggtgccaactggacgccgagccaggacgtcccgccgccgccgccgccgcaaccgctggctctacccctcatcggcgacggctcggtcgacaagccgatagacatgacgctcgccggcgccgacatggacaatgacgaagagctccgccaggcgattgcggtttcgctcgccgagaacggcaatgtctctggctcgagcgcgacgggcagggcgacgccagccaacggatacactggcggtggcggcggcaccgtcaactttggcccgtccacgcaagagggcacagaccagaatgcgctcgtctcggtcaggctggctcccagcgtgcctcggtcgcaccggcactctgctgacgctttcttttgggcctgacctttcagaccgcaatggcaaactgggatccctcaccaccggccttctcgacgaccgaggacaagcagatgaacgaggccatgctcgcctcgtggcacgactcggtccctgggtccgacacgatctttgcgccgcggacgccgggccctcggtcggctggagcgtgagtcctttcgggcgcggcggcagtgagtgcgctgtactgacagtaatctgtttgcactcttgcgcaggccactcgccttgtacaaccccgacccgggtatggcgtttgcgacgtcgctcgtccaggccctcctcgcgctctcatccttccgcgaaatcctcacctactcgtaccccgacccgatcccggccccaccgccaggttctgagctcgcctggctcgccaactgcctcccgccacaggcatgggacgacctgcaggaccttgcgaggcgggccgaggatgccacgacgacgacgacgacgaagacgatggccgctggcgaaggcgaaggcgcggcagcgtctggaggcgaggaccccgagtcggtgctcgttggcatcgagtcggacgggctttggcctcgggcaaggcgcaacacggacccgtttgagcctgcgtcgagtgcgttcgattcccctccgctaatgcgatcgcataagggccggcgattaacatcctgaatcgctctccgacctcctgaatcgctccccgacctcctcgcagcgctctatgaacagattgacgagatcacgggcaaggccctcgcggccgcactgatcccgcaagagggtcccctgccgcccctcctccagagcttgcggacaacggccaagtcgcccccacggttcgtctcctttcgcactggccttccctgtgcacgcacgacgaattaaggcgtgatcccccttttcgtcgggcagcttcttcaacttcaagacggtccagccgcttgcgccgctcggcccgaccgaggagcaagccaagcttacgatcccctgcgtcacctcggcgaccaacacgctccacaaggcgatcgcgagccagctctggccgaccggcggaggaggcgacgagcagcagcggcggtgggcgatcgacggcagtggaccgagggcgctcgcggtgtttctcgcgtggccgaagagcccgccgctgggcggcagggtgccgtttgagctcgaggagatcatctacgtcggtcagcccctgctcccggctctgctagagcgtcatccttgcgcaccagaggctgacaggcgtcggcttgggtgcgtgttgcgccagaccggtaccttcggcgcaacttccagcaggtcttccgacttcaggcgagcgagggcgtcctccggctcgaggaggacgagcttgccagtcggcgggcaaagctgacaaccgtcaaggtgtgtcgcctcccgtctttgccagccttcccctcttacacgtctggcatcgacggctgattcgcttcaaccggttgttgcacaaggggaaggacgtccggagccatctcatcaatgcgatcggctactacgagacactcgcgccggcgcccgcggaagacggcggagcggaggagcggccgagcgcaaccagtcacgcaaaggtccgttccccccgcctccccttttcattgtccgtggcctatctcctgagtcattgatctcccacgccccctcctatcccagctgaaaaagatcctcgccgagctcgacgctgaagtcgcccggctcggcgagcgcctcgccgacgtccagacgaagcgcgctgggctgtttgacggcgccgacctcaagaagtatcctgtacgtcttcgttcgctttctcgcttgatcgagaggccttgcgtcggcgggctcggcgctggatcgagaggggattttcgctgatgcccttctgcacatctccgatcgacggggcagcttgagctgaaggcggtcctcgtccacaacggcctccattcgaccgggtccgtctacgcttatgttcggtgcgtctgcccctcttccacctgccctattggctctcgctcggcggaagcgctcacgggcgatccgggccgacaatgggctgacgtgctctttgatccgctgcgccctccccttcgctcattgctcaccgtcgcgctcgcccgaagacacgccacgagctggttccgcatcatcgacggtacctcgaccgccgtcccctttgcggccgtccaggccgaccagagcgggctgcacctcggcgcgggcgtctttggggcagtctacgaaaggggggaggggtggattgcggaggaagaggaggaggtcgaggaagaagagggcgagggaggcgggccggcgacagctcgagagtcagaggtacgtcggaacattcacatctcgcttgtcgtttcctctccctccctcggcttcctcgttcaccctcctcgggtgggaggacgcagatcggccacaccatcttcgcacgcacgcacgcacgcacgcacgcacgcacgcactgaccggcccgcctaccttgcccgcccgcctcgcctcccaggagccgcagccgatggacgaagacccgccctctctgacgacaacagccgcggtgggcctcacgggcgcctcacggctgcccgaaacggacggcacgatcgtcgacgccgacgctgacgccaacgccgaggacgagtccgggcaggacgtcgacgtcgaccggatgctcggcgtcgtcgaagcggacggaaccggcggcggcggcgaaggttggaagcagggcgaggatgccaaccgacggcccgtcgtctcggtcgacggcgtcggcgatggtggtggtggtggtggtggtggtggtggagcggaacggtcgttggaggaggtacggctcgccgacgagttgcgcgaggggccgtgctgatgtcttcgagatggcaatcttaccaatcgaccctcgctcgattggcctcgtcgcttcttcggagggcaggccgagcaaagaacgacaaccgagagggtcaggtgtcgtccggcaggcagcaaggcggacgtgcgcagcgcagtgcagtgcagtgcagtgcagtgcagtgcagtgcagaacccccgtccctcggcagacgtcccatcctggcgagatggcttatgcatgcggcgcacgccagtctcgcacgcgccgccttcttgagcgagaacgaagacggtcgctgttgacggacgctggtcaggaaggggcgttgcttccggccgcctcgttgtcagcgggggcgctcgtctcgctccaagagcccgtcctccgacgacgatccctctttcccttctctcttttcctcttcatcgactactcttctcgcatacacgaaacacccgagaagccagccctttccaaatcccttccaacaaacaaaaaaagtgcaaaaaccggcccccttgctgctcgctcgttgcgccgcccctcttcgctcgccggacccgacgccctcctccgcctgcccgcccgctcgtcggccctcactccctcctcctcaaccctcgccgcctctcgcaagcaacccagcaagcgcccatggcttccgacccgacccacaccctaccgccgccagaccaacaccgcgaccagcagcagcagcagcagcagcagcaggccagcggcgagtcggccatctcgtcaagcatggccgccgaggctgggacggcaaagtttgtgaagctctgtgcgtcctgagctgtctgggctgaggcgtctgtctgtctgtcgtcaggggagcgtggtggagcgggacattgcctgcttgctaatgatggaggagggaggagcacgtcgtcgccgctgcttgcctgccgctgccagtcagtcttggagctgacatccccccccttgccggtcggttctccttgcgtctctcaagccatcttcggcacggtccgtccctcctcctcctcctccttgcatcctatcgagccagaacgagccctgagctgaaactcacctatccttgcctcggcctcttgcgccgacagacgtttgagattacgagccgctacaaggacttgtccgtccccccccttcctcctcccttacctcctcctctcccctccctctcatcgtccttgacctccgacgctcggcctcgctggccggtgtcagcgccgagccgcgggcggggcaggaccgttgcatgggcaagctgacctgaccctcttcccccttctcctcctgcccctctcacccgtcgctcgtcacccctcgtgctcacacgctcgtcgctcgtccctcgccgctttctcactcgactcgtcgctccctcatcgcactctcgtctcgtctcgtccgcgctcgtcgcgcgctcactcgtcgctcctcgcttgctcactcctcgttgctctctcgtcactcgctcccttgtcgctcgtctcgtcaatcgtcatccgctcggccctctcattcggcaggaacccagtcgggatgggcgcgttcggcctcgtctggtgcgtcgtcgtctttgtcgtcttgtcttccctctgtgtcgctctggcttgctctggcagagtcactttggcccggactcggctcgctccgcccccccttccctccggctcggctcgcgcttgccctcagcctctaagctcggctcggggctcgagcccggctcgggcttccgcgttcggcttgctcttgctcgtccaggctctggctcgttcaaacgaacggaacgggacgggacaaatgggaggggcggggagcggtcgggggcgagtttgcgtcgggtgtgggtcgacgaccgggttggacgaagagggcgatgacgacgatgcagaaggccctcctcccccaatcacctccctacctctcggccggcctccgccattgccctctgcaggagaaggccccttcggacgaaggccccttgtccgagcgcgcaacgccggcccggccgtactcggggaaggtgggacgacgaggtccgccggaggccctcctctcccctccttcacccacccatccaccctttaatgtacgaccgtctcgagcacaccccaaccgtctccatccgcatgctttggaccgaacgctgacctttgccgcaccttctcttcccgcagacgtcccgctccccggctccatcggcgaaggcgcggcccctcagcagccaccgacggccggcgtctcgaccggtgctgacggcctccaatcaacgccgtctcagcctccgcgagccactaacccactgatccaggtccaggagccgacgccccgtcagccggtcatcagccgcttcaactcggcagagagcttcactggcgacggctcgccggcgcgaaagagtagtccgacgaccgtggccgtgccgtctcctgtggcgaccagcccgctcggcgcccctcagcctgagcgcgacacatcttgggaggtcgactcggacgatgaggcctcgatggccgagaagcagagtgtcgcggccgcgcagaaagaagaggtgcgtcgaagcgcgggctggccctggtgcgaagagagtgctgacgctgggcggtcttgctctcaggccgacgtacgagctgctttagccgccgccgcacaaaccaagcctgctccagtcaccatctccctcaaaactattgtcaaggaggctacgccagcacccgtcgcgcctccagtcaccccgtcgacggaacccgcgcccaaagtcggccgcggtaagaggggcaaggccgctgtcgcgtccgttgcagcgtctgcctccacttcgaccgcgccgtctcggacgtcgacgcccgatgtcgctgcggctgcaacgacggccaagaaggactggacgctgccggatgccaaattgcgaacctcctcaccggcgccgagtacgggcgacggtccgacacccggagaggacctcagcctctcgcgcccgtcgatgccggccgctgccgtccgaggacgtcagacgaccaaggtcgccgaaacggcaagtcgtgcaacatccgcctcctcatctgcgaccggtccggccgccctgtcggccaaatcgggtgcgagccgcaagaagagtccctcgccgccacctttcagcgcggtcgaacaggcgccgatctttagccgcaaggccaagaaggagaaaaaccggacgacggcagccaagaagaatggtggcaaagccggagcgactgctgctgcgcaggcggccgatgaggagactgcagagaccgccggtccgacgcctgatgagctcgcagctcaagcactggctctcgccaaccgggtcccactgctcgagctcggcgactggtacctccctccgccgccggccgagccgtcgaccctctcgcagctgcttcatcagctcgcgcccgtccttgtcgcctcgtcgctctcgttcatcgccccgctttcgcacacgcgcgacctcattgagacgctctcggtcgcgtcctgcctcgagccagcgccgctcgccgtcgccctctcggcactgacgacgccgacgtcggacgtcacgatggaagacgctgtcgctgccttccatcagctcctaacactcttgaccgacaccatcaccggcatcctcaacatcctcccgcgcgacccgccgagggaccaggacgtcgccaagcgcttcggcgccatgttcatggacgttcggcgcggaacgggccttgcgacgcggtttgccgacagcgttggcgccgctcaggccgctgctgccgtgccatccgatccgctcgcagccgccggtggcgccaacggcggcgaccggggcgagcgcgaggttgaaaggctcaagagcgcgctgtaccagcgagccaactacctcgccgagcagctcacccgcctcgaggaccttcacgaggagatcaactcagtgcgcacttgcgctctgcagatgtacgtcggacagagctgactcctgtctcatgttcagatggccgtcgacgcactcgtcaggaactacgccgagaacgcgcccgccggcgtgacggccaactctggcaaccgcatcgaggagctcgagatggcgctgctcgtcgcccgggcggatgtcactggcaggactgccgactttgccgcggcaaagcaggcggcgatgggcgccttctacgagggcaacctcgtcgatcttgtctgggctggccaggcggacgaggacggctacgacgaggacgaagaggaagatgaggaggcgtacggcagctacgacgaggaggacgaggacgagggcgaaattgagattgtcgatgaggcgagcctcgactaggcgttgtaaacaatggatggctgccaactccccgagcattttcgacctgcgagagtccactggcctggaaggatcgtgcggtcgtctcggacggccggcgccgaagtcgcggcggctgagcgatttcgacgcgcgccaaagcgaccggccgaagccgccttcaacagcctcccgacctccatcatcctcccgtgcactctactctactcaaaaggtgcgtctcactcccgaatcagacctgggtgagaacatgggtcacagccggcctcgaagtgggtctggcgagggacaagggagcgagttggcgagctgccggctctgcgcgctgcccacgtcagcagcttcctcccctcgctgcccgactcgaccagaggagcagcaacctcgcagcgcagagctttctcgaagtctgctcgaggcaaaggaggtggcgcatgtcatcccttgatcgacctccttgccctcttcgtcgctggggaacgactctgcgctaagccgggagcgcaacccagctcgctgctcactttttggcgtgcccctccaccctgcctcctccgaccatgtcgggctgaccatctccttcctcttgtcaccttcatcagctctcatcaagtgagctccataggctgttgtccgtctttctgatggtcgtccggctcagctgacgctcccgctcttccttgcgtaccggctgcctcagcatgtctgctcgcgtccagaagcccgttcgtcgcgtccctttctgtcgagtcgttgcagccctgaggactgacgctagccgtgcgtcttcaggcccccgccttctctggcaccgctgtccgcgagggagagttcatcgaggtctcgaacaaggactacgccggcaagtggtgcgtccgaccgattttcaacctgacttggccaacttgcgccgtcacatgctgactgaccggcggcgccttttcacacgcaggctcgtcctcttcgcgtacccgatggacgttagtctccttgccttctcgcctttctgcctcagtccgtcgacctgacgtcttcttcgtccctcgcctcgcctctcaacagttcaccttcgtctgcccgaccgagatccttgccttcaactcagctctccccaagtttgccgagatcaacaccgaggtcctcgcattctcgaccgactccgagttctcgcaccgtgcgccggcttctgctgctcctgacgccacgccagcctcgggctgacagacctttcacccatgtgacctggccgctcgacagtcgcctgggccaacctgccccgcaaggagggcggtctcggccccgacctcaagctcactctcctcgccgacaagaaccacaagatcagccgcgactacggcatcctgctcgaggacgagggcgtcgccctccgcggcctcttcctgatcgacccgacgggcacccttcgccagatcaccgtcaacgacctgccggtcggccgctcggtcgaggagacgcttcgtctcgttcaggctttccagttcaccgacgaaaacggagaagtttgccctgccaactggaaccccgacggcaactcatcgactatcaagcctggagtggcctcgtcgaaggagtacttctcggcccagaagtaaggcgccctcccgctcgacatcaccaccctgcctctgccacccaacccatagatttctactagagcgtcccttcctctgcccctccctccttcatgcctaaacgcatcatcctggcaacgtccaaattcaccctctcggctgctgctttcgacgatgccaatgccctcccattttctgacgcccttgctcctcctcatcgccagccccagcgcagatgcagccaacggaaagcgcaagggcgaggtcgcgtcagatgggagcgatgccaagaagggccggacggcatgagagaatgacttttcgaagaaacttttggcggtcaagcagtgaaaggtcggcattagaatagaaaggcaatgggcggttgctcaagcggggaagcccaggccggcctgcgtgaacccgtgcacgatgccggcggccgcgataccccctccgagagcgccgctcaagacggccttgaagacttcagagacgtcgccggccccaaagacgcccgggaccgtcgtctcgcgcatcatgctggcgggcacaacgttggtcagaatgtctagatcagtctttgaagggagagacgaggacgcacgagactctgagattgcctccatcgatggtctcgcagccgagctgatccgcgaggtcgctcgctagcgccgtctctggtccgtgggcgagaaagtcgaccgaaagcggttcggcgccgctcttggctgcaaagtggacgacaaggccgccggccggcttgtcctcgagccgggcaatcttgtgcgggtgaacgatgccgccgcgctgcttaaagttggtgaaggtgacgcccgcaggagacgtgtccgtcggctctggtgcggggatgccgtcgaggaggatcgagagcttgctggtgatctgctggaagaggaagctgcccttgacgaaggacgagaggccgaggacggcgcccggtttgtcgcgctcctcccagccgtggcagaagacgcagtggtgaatcttgatgccccaaagctcgtcgtaacctggtagaagtcgagaggaagactgactcagtttggctgtcagacgtatgaggatctgctcttgacgcaccagggatgggcggcgcgatgtcgcggacgcctgtcgcgaggacaatcttatcgaccgtccaccggccgtcgagctcaaagcggccatcgtcaagccgcttggcgctcttgactatgtagttgtcgacaaagtcgacgaggccgtaggcggcgatctctttccggacggtggctcggaagtcagcgggcgacttgccgtcgaagcccaagacgttgtgcatgtgctcggcgcgagcgttgcggtagacgcctgtgggcgagcgaaggcattcgtcagcgaacagccaccgagagagcaaagagagcaaaaggcagcagactagacaacctaccagagtcgaagaggatggcgctctgcctcacgcgtgagagggcgagtgcagcagcaagcccggcggggccgcctccgacgacgccgatgatgggagggctgggtgacatgacagagatggtgtgggtgggaagggatgcgggctcgaggatcggctgccagcagctgctccctttaaggcctttgagttgcctcgggtccgagcctgctggccattgcggatcgacgactgggcttggcaggccgagcagtcatggccaatgggcgctggatcttgtcagctgaccgatgaccgaaggccgactcgcgtgctagcgcctggcaccgagagccggatgctgcctgcgagccagacggcgacgactggcttcggccagcagggttagcgtggatgccagggccgaggcgaggtaacatgctgcaaggcgacgagcccgaagaggaggtcgcaggatcgctcgggcgaaaggactttcgtcggaatctacgtagtctgccagtcttgcagcaaggtccggcagggtcagccgttcaaagaccgtccgacaggatggcgtccaggccagctgcacgagcttggccgagatgatggtcggctgcaaggggtcgagcttgggcagtcgctgcgccttccgacaacgatcctgctcgacctctccagcccgccttccctcctgtccagaccttcgcttggggaccagacgtcatgccggtctgcccggtttgccaggtcgacgtgatggcagacgagacagcctttaggtctgttgagctcccgccgtctcccggtgcgcacacactccagaggctgacctccagacgcctctctctgcgccgccactagccatcacgtcggcggccacttcgagagctcagacaggtcctctgagacctcgaatcacggccacggtggcgaggccgacgaggatatcctctgggaggacgagaacggcgagctggtcgctccgtacggcagcgctgccgcgagctcgtcgtgcgtcacgcccggacccccttcaggctgctgctgcctgatgactaacctcctcaccgattcgcctgtaacgctgcagaggagtcagcgtccctgcatgtccggtctgccgcctggcatggggcttcatggactcgatggctaaggagcagcacgttacctctcactttggtcagtgagcctctcctgtcaccgccgctcttctgctggcttcccgacactgacgccctactttgtccttgctcatagatgaggacctcccgacggcatcgtcctcaaagagtccttctgccggatcacctgccggcaagcggtcacgggcttcgtctggggcatcgagctcaagcagagcagggcagaagcgcagcagccgagacgtcgcctggtcgacctcgtcttcagagtctccacccaagaacgtcacgcccggtgcgcctcccgttgcggtcgtggggtgtttcgagctggttatcactgacacgcctgtgtcctccttacaggcgtcctcccgatcctccagacgctgctcgagaagagcgcgacgacccgaagcgccgtcctctgcgacgcggcgacgctctacatcacctcgatccatctgttcgacctgacgtggggctgcggctatcggaacttccagatggcgtactcagccgtcgtcgaccgcctgccgtcgccgttgaacgagccgctcgcggtctttgacttccagcgctggatcgaggatgcctggcgcgacggctttgatgcggtcggcaaggagcagctcggcggtcggctcatcggccgaagcaagtggattggcacggccgacatctgggtcggtctcagtgcgcagggcatccgttgcaagctcggtcagtatgcttgtcgctttgttgacctcgacgatcgaagctgatcaacccctcgctctcacagccgactttccggagatgagccaaaagcaccacacccactcggccttgacgcgctgggttgtcgactactttgtgagacttccagtgatagccgattcgcctggtctgaagttgacaagtcgcccgtctcgcagaagccagagggcgcccgcgacggcgatgcgtttggcaacctgatggcgagccagggcgccaaggtccgcctcagcggcaagccaccgctgatcctacaggtgcgttctacctgttgatgaggtctttcctcggccagggtcgctgacggggcaaacgccttcgacagcaccaaggccattcgcggacgattgtaggcgtcgagactctcctcaacggagagacaagtgagtgcggagctcgttccttgacagcccatctttctgacgccctcgccttccctcggccagacctgcttgtttttgacccaggaaagacgttgccgacatcgatacgaaccgaggccatggagtcgaccgagtcgccaccgtcgtcggcgtcctcttctgagtacgaaattcctgtcggcagcgactcggccaagaagcggccggccagcgagaggggctccaagcgcaagaagctcaaggccctcttcaagatcgagggctcgcatctcaagctctttcgggtcaggtgtgtgtgctcgaccggcgtgctgatgggtgcctgcgagctgacgaccgccccgcttcacctcctgaaaagcatgaagacgctcaagcgcaattcggcttaccagatcatgttcatctgtcctctcggagactacccgaagccactgatggactcggaggagcgcgcgcggaaacgtatcgtcgcctcggagcgcattgtcaagtgatgagctcgcctaggtgagtctgacgtccctgattgcgaagcagagcagcatcgactgacggcctcaggagtgttgcagccacgtgctcgagaagactctgggccgcacgtccaccactaccctttatgccaatctcggccgcgaacctgtgatcgccctctcgcgcttctgcctgccgtcggtgccgaccaacgctcctccggtaccctatcttgtcctcggacggtcaccctccttctggtcggaaggtcatcagatcgctgccctgcgtcgtgtcttatgaccagactcagcgtcgatcctcgagcatgtacatccgcgtctcgccgatgcccatgcaatggaagtcgctctcggaaattccggcctgattgcgagcgtcagccagcaaacgcggtctggatgggcggccgagaaaggtggctcagtgtgggctgctgagggataaaagtaagaaaggcaacgcacggctcgtctatcggctcggtcgtcagacgccagacgccccagtgcatgccaatggcttgctttgctttctgtattcgaggtattcgaaatggtcggagggaggggtcttcagtcagccggcgatcgatcaaggctaaagtagaagtcagttgacgcacgacatcctggaagtaccgcacggcctcgaacgggtccatatgaacggcactcatgaagcctcgaggctcgtaagcgccgatcgggatcaaagcgagatcaaagcctccaaagtgcgcgccgatctctttgaacgctgggcaaacggcccggtctggccggtagtcagctggcgtcggcgagctcctaggggcctcgtcgggcaaggccgagtagccagtgtcgcccgcgaaaaggacggacgttggcgctgagccggcgggtcctatcgatgggacatagagtgcgaaggagttccagagagaggcgcccctgagaaggccaaacaatcagcggcgatcaccggcagaggcttcgagagaaacgcacttgtcgaagggcgtccggctggtgaagtgctgggccggcgtgccggtcaccgtgaggaccgtcggctccgtttcctcgccgaccataacagagaggtcagccgtctcccaccaatcgagctcggtcatgtcagagcgctcgaagccggtgccgctcatgcagcggattgtgttgagtgggaggaagacgtgcggccgattcggccgcttggcgatagccttgagcgttgttatgtcgaggctgcaagagaaagggtgtcagctgggaatactttggccttcatgcagcagactgcgacgcactggtcgtagtgattgtgagagagaacgagaacgtcaaagtcgggaatctcgtcggccgtacacggagcggctgcgagcagaatgagaaacggcgagtcaacaatcgtcggcttggacagacagtgctgagcttacgcgtgaaccgggctgggcccatccactggctcggcgagcagcggttcgagagcacagggtcggtcaagacgcgcagccctcgcgaggcacccttggccgcagggaactcgatcaagaaggaggcgtgcctggggcagcaggccgaagatagtcagatctgtggcccttcgagctcgagcagggccagacgtacccgagccaggtggccttaatgccgtcgagatcctgcgtctcgacaccccaggtcggtggccggaccggaatgagccgcttgatctcctcggccggcggtaaaggggacgccttcgactggccgcggaacatctgccagtgatgatagatcgacagagtcaaccccatctcagcgcgagtgctctggccggcaggcggcagctgcacgacgctgacgcacgcgtagcaactccatggtcgacggctcgcggaacgacggccaggggttgctgagagaagttggtcatgagtcggtcagctcgtttcggagcagctgcttacaactaaatgcgtacgtgaacaacgttttgctgtcgttggcgtgatgggcgggccttgtcgtcccgggctgcttcgctgagaggtacgagggcgcagagctgatagtgaagcggctccggccggcagcggtcgagctggaggcggctgacgacgacgagagaccacgctggagcgaggaggatgcgctggacattgcgcgacgagcgagcagcatgcaggtcgagagtcagggcgaggtggtggtcgaagatgggagtcgagcgggagctcgtcggtcggggttgagatggacgcgcggccgagcccgaacctgtcgcccgagggcatcgtgcgtgcttcgcctcaaggcagcgtctcaagatagaacatcgcataagagcagagacgcgaagggaggcaaggcgacatcgagattgcaggcaagcagtacaagaagcaggtctgaagtagtcaattccccgctatccctccctgtgctcgagggcacacgcttgtggagaggtcagtaggcgggtcaacagggcccagggatcggccaaagagcgaaggaaagccagtcggcaaaggtctgagccgctttgagtttcagagtaaggagagttgagctacgatggtcaagaggaagacaggcaagagtcagtcgaagcgagtcgtaggagcgaagccgaacgggacgcacagaatcaagacgacgtgcgtggcgcttatcgggggcaaagtagtcaatgagaagccacaggagctggtctcaagaggaccccaacggggtagagagtgggatgcgatgtacttgagcgatcgaaggccgtgcaaaggtcagcgacagaaggtcgggcaggggtacaacaatggcatgggtgaaacagtccgagggttagggtgtaacgggcatgcaatgacaaaggcgggtctatggacgggaggcgaggagtttgagagttagacgaggggaggagacggaagcagaggaagggagcgcaacttagaaggcgaaaaagcgagcacgcgcccggagaagtgagagggagaggaggcgggagaagagaccgtacgacggcatgagggcgcgccagtggtcgaagagggggacagaggcgggggagagggtgccggcggtagagagaacgagagggaagaaaggggtggcggtgcgaccgaggtacttggaccgcttcccccccaactgactggccgcccccaaagctaccgaccctgttctcgcaaacagcatcaccaaaggccgctttgcagagtcgcacgtcccgcgccacgtgcgcgacattatcgtcgccgagagtggcgcaaacgacggccttggcgtaccctttatcttcctgccgctttacatccttttgtggaagaacccccacaatttcccaaccctcggcgccgccatcggcaagtggttctacgacatctggtgctaccagattttgctcagctgcatcgaaggcgccctgatcggcttgtgagcgctcctccccgtcgaccaagagagacctctggctgcttgctgactcttttcccacgtccatctggaaccagcgtcgcacgcaaggggctcaagtacgccaagctgcaccacctgatcgaccacgacaacttcttggcgtacggcgtcggcctcaccttctttacgctcggcgttgtcgggctcttgggcggcgacgacctgctggcgtgcttcatcgtcggcaacagcgtcagctgggacgacttttaccgcctcgagacggaggacgaggctttccaggtcggttgtggtgccgccaatggtccgttctctcaagctgacgtccttcctcactcccgcaggacgtcatcgacaccctcttgaaccaggccgtcttcatttatctcggagccatcctcccctgggaccagctgacgaatgccgagtggaactgtaagggcctcagacactgccacttgacgtcaccctcactgaccagcttcgagcgcaccttcagtgacgccgtggcgcttcgtcgtcctcggcatccttatcctgctcttccgccggctcccctttgtcgtcggcttgaccaaagcgatcccagtctttgcgacctggcgcgagtcggccttctctgggtgcgccttttctcagccccgaggctatcgtctcaccaagctgaccttttgcgcccgtctcgcctttgtagctggttcggcccgatcggtgcgccccatcttcacgcccttgtgtctcacgagaacacctgttgactcagcgcagctctgtccaatcaggcgtgtcggccgtctactatatcgagacggccctgcgcgtcttgccggacgatgaggcacacgcccggctgcgccacacgatcggtcccgttgcgtccatcttctcgctcctcttttgccttgcttcgtctactgaccccgcttgatgttcctctaggtcgtctatttcgtaatcttcagctcagtcttggtgaggatttcgaaaatctcactcgagcgctgcggctgctgacctttagctcatcccgacaggtccacggctttaccgtccccgtcgtcaaactctcgacgcaggctcgcgttctgacgcgcacctggtcggtccagtcgagcggcgtctcatcgaccgttgacattcgcgagcacacccgtgcagcactcgactctatcccaatcggcccgacggccgcgccgacggccacgacgattcgcttcgccgaggagaccgcctcacccccttcctcggacgcaagcagtcccgccggggacaacgaggtggccaagcccaagcagaccaagacgccgcccgtcgctgtcccagctcgactggaaaagggagagcgagcctacgtcgagggcaagcaggtcgtcatcgagtcctctgctggcggctcccaggcaaggcgggtcgtcagccgcgaggccttcgagaaggcaaacggcgcggacgtggttgaccgcagttgagctcgcggagcctgaggatgctcatgggcatcgcatcgtccgcaaccgctctatctaggccggccgagcgtgaacaagacctcgcccttgcccttgcccttcttcttaccgccgtcactggcgctgccggcaccgttcgactcgaccggcggcgtcgtcgtcgaggacgcggccaaaggcggcgtcgtcgacccgctgttggacccagacgcccaggcgagctgggccggcgttttgccctcacccgtgacgcgcttcagcatctcctgccgctggctcggcttctcaaagagcgcccgccgctcggcagccgtgccgccgcccgtggccggcaaggacggaaacgaggcgaggctagcgggcttggccgctttcggcgccgcccgcccgccggctgacgaggtcgacgacgcgtagttgatggagaccggcgtcgggcgcgatgcctggctgagcgaggctgacggcggcgggaaggcagggaaggatgaagccgcaggaggcgctctcgactgctgcgaggcccacgccgtcgacccgggcacggcacggccgccgctggcagtcaccggcttgggtgtgcgggtgctagtctgcacaaggctggcgggccgtcctgtggcagcctgagctggcgtcgggccggccaacaacggcggcggaaaattggacgcgtaagtcgacggaccgggctgcgaaggaggggccggacgcgagctcgatgcctgcggggcggccgccgcacgctcgacgcggtcccagacctgacgtgaggcctggccgcggagcgactgcttgacgtcaatgacccggccgctggcgatgccggcgtagcccgtgccccgggtgacgccgcggtcggtgttgctcccgttggcccttggcgtcggcgtctgcgacgggaagtcggcctggtgctgagagcggcggcacggatcatggaaagggtcagctccagatggcggggcgggacactgagtcagacctacatcgcgacgccaggtgtggaccttggcgagcaggtccttcttcttatcgtcgtcgacgcccgtcaggaggtgagccgcgccgacggcaacattcgccgtcgcatcgacgtcgtgatcaaagatattgaagagcgtgtcaagcacgtcgtcggcgccgttctggccgctcttgtagccgccgacgacagagcggaagacggccatctttgcctgcgagtggtcgacgaggtttgagacacgggtgaggagggcggcgtgttcgctgaggaacggaaggagaagcgtcggtcagcagcagcgcttcacaagggagctcggcttaagtgggcacgcacgccatgacctcgcggtccgggtcgtcatcgtcggcagcccggctcggagcagcgccgctcgagaggctggcaccgaatgcttcgcggcgcgacgacgacgaggaagcgccgcctccgccaagcgacggaaagctttcgccgcgcgccggaggctgagcgcgaccgtttcgctcgcggctcgaggtgccgctcggcccagcgaccgatgtcgtgccccgcgggtcgtcataggtcatcgagacctggacctttcgagcgagggcgatgtcgcgctgcgacatctgggaggcgtgctgcaagggggggggacgagtcggacgggacaggcgtcagcgctttcgacctaagtctctcgcgccgggccagacacgggcgcacctctgacagctggtggaccttaaggtccatctcggagccaaagacgacaaacttcttctcgagacactgcgagtcgtagcacgggaagtgcgccttctcaaagtggttctcgagctgctgatagttctggaagctgtagcgaggagggcggcatcagctctcccgcgcgacccgatcgttgacagagcgagctttccgactcacaaggccttgacgcccgagcgcttgcagacaaagcagtcctcgtggcgctccttcatgtgcttggctaggtcctcgtcggcgaagaagcacgagcggcagaactggcacctgcggccgtgcagaggagggcttcgagtcagtctcgatgttatcagaggtcgcgagacgagcaagagagcccttacatcgggtggacgcccatctcgggcgtgatctccatgccgcgtggcagcgtcggcggcttgccccgggcaggcacgcgcgacggcaggtggtgcggcaggagagccggcgggtagagctcctgctcgtgcgagaaaaccttcttgaacttgatgcagacatcactgagaacgaggcgcaggagggtagagggccgtcagacaggcgggcccaacagaaagcgagcaggtgttggcggacgcaccagagctcggcgccgtgccggtgcgaggcgtgctggcggaggtcggtccagccgccggcaatgtagtcgcagctcttgtctggacagttgaagcggaggagcaggagcgagtcctccatctgcgaaggcgagcagcgaacgggggtcagcgcgagggtccgagggcagacgcgctcagccgaggcgcccagacgagagagagagggaccgaccatctcggcgctctcaaacatgatcctgagccggtcgtccttgaagtctgtctgctcgagctcctcaaacggagtgtctggcgaggtcgtaaagatgacgtcctcattctcggcctatttgaaggagaaggcggcgatcatcagctgtcagcccggagaggagagagggccgctcagagagggtggcctgagcgaggtaaatgaggtcgcaccttgcagtatgtgcactccttcttcttgtaaagcgcccggagccggagagcacatacgtggcatgtccgctgagaggaagggcaggccgtcagctcagagggagaagggtccacagcaggccgggccgacgacgcacatggttgcacgagccgacgctgaagtacttgaacggctcggcgcagatgaaacagacctcgtcctcctcgtcctcctcggcctgaccctcgacgggcgagcccggcttgggcgtcggcaggtcaaagacagtcttgccgagctggctggcggcggccgccttctggtgcggagggagggctcggccgggcgcgggctgagcctgctgctgctgctgctgctgctggccttgggcggcggcaccgcccgaccgaacctcagagagcttgcccgagaactgggcacgacggggtggcataggctgcgagggtatataagatggaagagaaaggtacaggaggctgatggaggtcggaggacagggcaagcagcagggcgatcgtcttcggatgacgcccgcgggcgaaaagagcgcgctgcagagagagaagtggggcccgagctggcgacgaccgacgacgaacgctgcgaattattggtcacaaaggaagattcctcgagacagcaggcaagaggcatgggctataccggttgcgctagcgacggcagcgtcggtcggtcgcgtcgttgtagcgaagagggcctgctcagcgttctcctcccggccgtcgatggcgccgacgatgccaggtggcccggtaaaggtcgcttacatcgcgcccccaccgccagcgagccgacgccggccgcatctactgctggcagcgaggccgacggcgcggcaaccggtggcgctggcgaggcgtgtgacctcggtttgtaaataagaacgatctggcggcaggggggagcaaggggccgatcgtcagcggccgaacttctgcgggcggtcgaaaagccctcccggtcactcacgacgagaccgacaatgataaggacgaggaggaagatgcatttcctccggccggtgttcttttggtacctggaggaagatcggggagagcgtcagcgagacgcacgccagacggggcagagcacaagagcaacagactttgtcgcgatctcaagctcctcgaccgaggccttcatctcgcggccaacggtctctaggttgtactcgaccgagtccagcatcgtcccctgctcgacgaccatgtcgcccaaatcgcgaaacaggtcggcgagctcggtgatcgacttagcaatgtttgtgatctcgtttgtccgtcgctggattgtcgcgtccatccgggcggtcggctggacctgctcggtctaccagcgatacggccggaccgtcagcccagcagtggaagggacggtgggtatccgactcggacgcaccgcctggagatcgtcctcgagcgcgaccatctccttctcgcgcgacatgagcatcgccgcgccagacatcttgagcagcccttcgctcttgctcacgtgaccctggagctctgtgggcgcgagggtccagtcggcgtcaacgcaagcctcgcggaagcgggcgagcactggcaagcgaagaaggactcactctccatgtacgaccgctgcttctttcgaaacgccgcgctccgatcctggaccttggccgctaggccgcgctggaggttcaacgtcgaccgatactctgcctctgatgccgcctcgggccggatgcgcttgatgaggtcctgcgccttgcggaagtcctatgcggcgcaacggaggcgttgtgagcgtcgcagatccaacgattgagcagcaagcggatgacggaccctcgtgatgctctgcgtcatggcctcgatgtcgcgctcttcggctgagcgatccttgaagccgggcaggacgtgcttggcgtgcatcttgtccagtgtagcgactgcgggccaggggggtcagccaaaacgcaacccagttttaatcccctcgccacacaacgcactcttgaccttgacctggtcgagcagcgttgtgacctcgtccgagatgtcgaccctgggagacctcgagtgtcagtcgatttgacggtcgctcaagctgggtcgcgcaacccgccaggcacgcgccggccagctcgagatgatgggacgcaccatatcggcggcaggccgctcatcttgatccgcgtctcgcccccgctcccgtactgacgagccttgcccttgcctttactcctcgccgaccggccaccaacgcccatcagcccggccgcctcgtcgtcgtctgaatcgtcgcggccgtagctggcccccgcatacggccggcgcgacgaggtcgacgggtggccgaaggtcgagcggatggagaggaaaaagagcgtccgtgaccgagtgacgggcctgtgatcagcaagcgaagagggagaacatcagcctcagagtgaatgggtagggaagagaggacgaggaggacgcacgccgagctcgacgcggccgaacccgagacgggcgttccggtccggtcgggcgtgtacatcgtcaactgtccctaggaagcgagtcgaaagctcttgggagatggcctgcacgcgaaggcgacctggcttagcctggcctaaggaaggaggtcgagacggcttaaaggaggacgagatgatggtcggccgtctgcgagaggacgacgagagctcgcgcgtcttctcccctccgacctcatcctccttgctttcagccgagccttccatctctctctctcgctttgctcctcgtctgctggcagtacgctggaggtgcctttcaccgctttcatcccgacgtagcagacttgtttcgcaggccggcgcatccagcagatggcgagcgagttcgcccttaacaactcgattgtgatcgacaacgtccggtcgcttcacctgttctcgtcggcacgcgtgagcactctgctgacatgcttgacgtggctctcaacaggggaccggctcgatcaaggcgggatttgcaggccaggaccaccccaagtgtttcttcccgacatggtcagtcctccccgctgcctcgcgtcctctcgcacgcgcgccgacgcacgcgccgccgctggcgtcaagggtcgcctccgtgctgaccgcctctgctcacctttgcagcgtcggccgaccaaagcacccgcgggtgatggccggagcggtcacgggagacacgttcattggccgcaaggcgcaggagttgcgcggcctgctcaagctcaactggccgatggagggcggcgtcgtgcgttgctgccctttgacgaccctgcgttcagctctcgctgacggcctcttccttctttcaggtcaaggactgggacgacatggagcgcatctggagctgggtctactctgaggagctcgggaccttgtcggaagaggtccgctcagcttgcgcctcgctctgctgcggctgccacgcgccgtcactgacctcgcccccccccacaccgtttcctcgtccgacagcatccggtgctgctaaccgaggcaccgctgaatccgcgacaaaaccgcgacatcgccgcacaaatcttcttcgagacattcaacgtccccgccctcttcacctccgtccaggcggtgctcgcactgtgcgtgcccagtaactatgcctccgtgatccgtgcttttcgactgatccctctcgtcgtgtgcagctattcgtccggccggacgacaggcatcgtgctcgactcaggcgatggtgtcacccatgctgtgccagtttacgaaggcttctcgatgccacatgcgatccgccgagtcgacgtcgccggccggtgcgtcccagccgtgcgcttgcgcccggatcctccagcccgacgatgctgatcacccgctgctcgcctcccgtcctcccagagacatcacaaaccacctgcagcttctgctccgcaagtcgggctcaaatctgtcgacgtcggccgagatggagacggtccggacgatcaaagagaagacgtgctacgtcgccctcaatccggccaaggaggacaaggagctcctcgccggcggtggcggagcgggaggccggggcgacgtcggcgcgagtgggagcggccggcgaggggccgtcgaggagttccgcctgccggacgggcgggtgattagggtacgttggccggagtgtcactgtcgctacgcagtcttgactcacgatctgctgccggttgctgcagctcggctcggagcgctaccgggcgcccgagattctcttcaaccccgagctcattggccaggaatacgtcggcgcccaccagctcgtcgtcgactcgatcaaccgggccgacctcgacctccggcggtcgctcttctccaacattgtcctttcgggcggaacgacgctctgcaagggctttggcgaccggctgctcaacgaggtgaagaagattgcgctcaaggacatcaagatcaagatctatgcgccgcccgagcgaaagtactcgacctggatcggcggctcgatcctggccaacctggcgacgttcaagaaggtgcgccgcgtctgcgccttccatcttatctgagagcaggacgctgacatgttatccttcgacagatgtggatttcggccgaggagtacgcagaggatcccgacctgatccacaagttttcgtagccgaggagaaagcgacccccttagacgcatcagatgaccctcacgaccttttcgcttgaggagcggacagacagtcatcagaaggcaggccgagtcaacggcgagtataggaagttcgagaggacaagacgatgagaggagaggacggacaggcaggcgaggatctacagatgtgggtctacagctagcgggtgacaggatggacgaaggatctagggaagaggtctaacgaagtgagccgacgagggtcggcagcgtcgagcgccggctcgtgccggctgatgtgcggctccggcggaggccgtcgtgctcgtcgcctcggtgtagcgaggttggcaaggtgggtacgcaaaagacatcgtcgttgccggcggtggtgctggtggtactgaaagaatgccgcgagcggcccggctggtcgggcaggccggtagtcggcttttgaggggcatccatggccgacgttgtccgcaatgaggcaaagacgaggtcggccaaggacgagtttgtgatgtcgagcggcaggggcagcaggccttccgactcgtgcagctcgctctgggtcgatgaccggcgtgagaagcggtagtctttgacggtgaccggtccgatcggctcgtaggcgtgctgcggcagcgacaagagggcggccggccgggagcgaatgctcgacgaaaagcggaacgacgaggtgtgcgacggcgaggtgagggacgaggcggccgtcgacgagatcgtgttggacagcgagggcgccttggagtgatggctctggtaggcgagccgacgggaggccgtcgaagccggcggaggcgaggcgaaccgggcggtcatcgagcctagcatctggtcgcctggcccgaccctggacagacgtcgggcgacccgaggcgtctgcgacgagattgagctcgttggcgagactgaaaggccgtcgtcgtagtctcgaaggctgctgcgaccgccgaggctcgacgccggcaggggcgtgctttcagtccgccggtgctgtcgctcccaccgcgcaagcggcgacgacggggcaaagtcttgcgcgcgggaggaggcggttgaacgcgtcgaccgagccggcgacgtctgcctctgtcgttcggcctgctcctgctggtggcgactgggtcggatggttcggtcagagccgacgggcgacgccgccgagaagagcggctcccaaggcggaaggaggtgctcggccgagcggatccctgtcggatactgctgctgttggaaccacgagctcgagaagggaggttggaggtggatctcgagcgacgtctgccggacgtagcgtgcgcttgacttctgacgggagccgcggcgggaggaggccgggggcagctcgccgtgcagaacccactcaaacagctcgtttgccggcgtcccgacgagtccgacggccggaggtgccttgccgaggacgcaacgccgaggcggtggtcgtcgagcagaagaagcggagggaaagccggcgaagaggttcggcagcgtctgcgagagcaagcgcttcaggtcagcacttgtatgcgaggaagactcctgcccgagcagactgaccgcatagagctccctccacgactttttggcacgcgacagctgagccttggtcggtcgacggcgagcgagcgagccggtgctctcgttgtcgtcgtcctcgctctcgcaccagctcccgcgccgcccaatcattccgatcagggcggcgagttcgccgtcggccgacgccgtccgctcgtagacgcccgcgtcatcgccttcgccgtcgctcgtgtcggtttgcggagcggacttgtagcgcggcaggcgggggcgtgcggcaggcaccgcggccagatgagcgtgcgagagcgagcgcgagcggaaggggggcgtcggcggcggcaggggtgaggagccgcgcgacgaggaggcgtccatccgcttagttgagagaaaaggctgtcgagggtgttggttgtcagcaccagtctgttcaaccagtctgttcactcaacgtctttcgtatggcgaaggggagggagggggccttctcctcctcctcctcctcctcctctctccctcggccagtgccatcgcccaccgcgttcgtgctcgctctctctctgccagcctgttgtcctatcgctgactgcccctccgccgccgccgccgccgccttttacagctctcgacgatccagaacgccgaccagatcttcttctttcgcgacggtcgcgtcgcagaaagcggcacgcaccaggagctgctcgcgctcaacggcgggtatgccgagctcgtcaatctgcagattgtacgtcgttggtcttttctgtgaccatcagtctccatcccgctgactcacaagctccctctgcagctgtcgcggacggacgagctgtagcttgccacctccttcctctcctttcggctcctctattctcacacctcaacctgagcagttccattcttcctcgctcctccatgttgtaccgtgtgcgcgcgatacctgccactcagccctcagtcctcctttgcttgcttgtactcgtcatgaccatcaccactgcggccgagagagtctgcacgcggttgacgagaggagaaaaagggtgggaatatccgacagtccaccaagcgcccgcctctctgcgagcctcaagcgagacggggagaacggacgccatgagaaggacttcgagcttgctatgcgacggagcgatgcccgagacaccgagcgacgtgaggaagtgccgctgcccgccgttcccacaagaagaggagcaacgaggacgagcggcggtgtcgctctggtctcgactgttcgcacgcatcgtgacctcttgcgaggacacaacacggcgaacgtaggctgcgttggtcggggatgaaggcagagcctaggaggtgaggaggcaggccggcctgcactggagaagaatggtcagtaagagcagctcaggtgggctgacggcagcggtcagctttggtcacggagagcgagttggttgtatgtcgagtcaggtcccatagatccgggcaccgtcatcgtctgcaggtctgaagggagcggtagaaggcgcgtgtcagccacagggagcctcacgccacggacagtcgacaggaactcacgtggcccgacacgacggcaagtcgacagtccaccgacgcgcgccagaccctcacgcaatctcgatcgacagcatcttgatgtcgtcaaatggcttgtcggtcttgtcaacgcgcgtctcctcgatcgagtgaatgacgtcgagcccgccggtcgcgcgaccaaagacggtgtgcttgtcgtcgagccagggtgtcggcacagtcgtgatgaagaactggctgccattcgttgtcgggccggcgttcgccatgctgagcgtgtagggtctagcaagatgggcacaaatggcagtcagagagcgatcgtggaagctgctgacgttctgcttcagtaagaacgtaccgatcatgccgcaagctcgggtcaaactcgtcctcaaacggcttgccccagatcgagtcgccaccggtgccatcgccgagagggtcgcccgtttgcagcatctgccgttatgaagggagcacaatgtcaggcgaggcccgaatgccgacgtcctgagagacgcacaaatttcttgatgatgcgatggaagatgatgccgttgtagaagccctcgcgcgcgagcgtgcaaaagttctcgacggccttgggcgcctggtcgggaaagagcttgaacgactgagatgaccaagagggatgcgtcagagcctgagatcgaacgggcaagagctagacaccgacgcacaatgtcgcctttcgtcgtgtggatgacggccgtcttgccgagcgcggtcgcaccgccagccttcgccggctgagcaagggcaagactctgctcctctcgcgtcggcttctcgttgaagacgtcgcggtcgccaccgccctttttgtcctcgggctggagctgcgaaaagaggtagaagcgcgagcgcttgaaggccgtgcagaagagggtcgggtcgcgcgtctcgcgctcagcaagcagcggattggctgacgcagccatagcctatagcgggcgaggtgcgggagggcgatcagcgagcctctcggcaccatgggaccagtgaaagaaggacgtacgatggtcgacatggccttttttgatggtgcaccctggtagagcgcaaggttaagccagcggtgcgtctcgtccttgccgagcactcgagcgacgcggttcgtcaccgtgttgacgactgcagcgattcgacactagcgtcagctcttaaccgccgagctacgtttgataccgcaaaaaggacacaccctttatgccgagcatggtcgggtaaaggaggaaaccgccgctttcgtcccactgacagctgccgagaccgacgccggccttctcgagctccttctcggacgcgagccggcgcccaaactccatatcgtcgagcttgtagctcgccgtgccggcctgctgcatctcctggatcgcctggagcgactcgtcgtactggcgcgtcttcttgcccgagaggaacgagaagatgcgcacgtgccggtccagcgagagcgtcgcaaaggacgtgaaggatgggttaaacgtcaggcttgacggggttgtccgcgcctggccagagcggagcgcagcgcgtgatctcgtcagcatgtgtgccagtcagcaatcggctggcgctaatgcaccttcttgaactcgtacaggtccgtctcgctcttgaaccgccagcggccctcgacgccgccgttctcactccgctcggcctccgtctcgcgctcctcctcgacgttccagtactcgacaaagcccccctcgtcgcagctgacgactgtgttgaagcggtcgttgaacgcaagcaggtggaccggcgcccggtggagcgtctcgagcgaaaagaggggcgtcgagccggcccggccgtcaaagatgtggatcgctggcgagttcgcgtccgagacggcaagcagcgtctgggcctggccagactggtggacccaggcgcacgtcttgggcacaaagtcaagcttgaggatgttgatcatgtctgcgatgagcagtaagtcgcagtcagtgcccggagtccttcgagaggcacctaggaaattgtgacggaccaaagttgacgacgtcgaagacctttgcgccgtcctcgccaacgctcgcatacactgcgccatcggcgctcgcgctgactgccgtcactgccttgagatgcgcgcgatagtgcttgacaaactcgattccctcagcctgcttcttccacagcttcagatggccgtcgagtgatgtcgtcaggacaaagtcggtcctgcgagagggaggcagagaggcgcgaggcgtcagttcaggctgcgcaggaagtcgacttggctctgagggcgacgctgctgagcgcggcggaccgcgagaagccgcgaccagagcgcgattccagaggcttcagctcgtggctcacgcacttggtgactgtgattgtgttgacgacgtcgcggtgcataaacgacttgtagtagcggtcggcggacgggatgtggtcaaggaacagctgctcgtgggcgagcacttcgagcgacaggcagcggcagcggccgggcgaggtcagctcattcgctcctgcaactgctctaaccgaccctctggcagctggagacacttctcgaggctgccagccgccgggcctagctcggcaggctagagggagctcgacagcacgcacccttgcgcttcttccgccgcttgccctcgcctgccgtcggcggcatcggtccatcctcgtcactgtcatctcctcctggtgctgggggagcaggtcctgcagttgtccagctacggcgtcagtcgctatgtgtcgctgaaggccgcaggcaggagccgctggccaggcacgccgtcggagctgctcacgacggcggcgcgcgcgcgcgcgcgttcgagacgcaccgatgtcgtcgccgctgtcactctcttcgacggcgtcggcgtcggcagcccgcttggagcttgccggtggcggggaaggagaggccatgcgaaagagaagagtggtagagaaggtgagtcgtggttgtcgagtcgctggctcgaggcactgcatcgcctgccggcacgtctctggcgcgcgcgggagcgagcttgcagcagcaagtgcggccagcttggccggcagtcagccgagccggagggccggaagctcgagctcgaccaccatcttccatcaccatcatacctgaccagacactcctgcacgacagagatggaccagacacgagagctcgctgaagcggccgacccgtcagcggccgaggccatcgcagcgctcgagcgcctcgccgccctcggtcggcgcccgccgcctggaccgagcgagatcgatcacgtcctgcagaagacaaagccgtcggcggccgtcctcgtccctctcttcatcggccggagcaacacgctctacgttctgctctccaggtgcgtgtgacgatgcttgagactggggccgagtctctcgtcctgcatcttgcccggcggcccctttcagccgttgaggcgcagcacctctcgcaactgccagctgaccgtcgttcggctgactcttattcatcatggcaggaggagcaaccacctcagaggctacccgggcgacaccgcgctcccaggtggcaaggttgagcccggcgacgtgaccttcgaggacaccgcggtgcgtcgttctcttgatccagccggcggcagcggctcgcatggcaccggctctcgagaggtcacgcggtcaggctgatctcgaccagagtgtgctctgtgggtagagacgagaggcgcacgaagaaatcggcctcgtcagagacccggccaaagtcgtcttcctcgctcagggcccgaacgagctctcgcgcgatggcatggtcgtcacgccgtgagtgccgattcaacatctgggtgcgacgctcacatgctgatgcctttgtcgccgcctcttgccgatcaggatcatcgtctgggtcaaggatacaacgctcattgtatgtcatcggcctggtcgccgctgcgctctctttcgcgctgattcgtgcaacctctcctcagcccgagctcaatccagacgaggtcgccgagatctttgcgcttccgctcgccaactttctcacctcggtctcgccctatcctcctcctccgccagcgccagcggtcgacccgagtgtgggcgggaaggctgccaggccgccgaagccctactacagctactttgacgccaactttgctgatcgacggtaccgccgacaccagtgcgtctcacgaatcgcgctcaacgtagccaaagtagccgatcggctgacgttatggctgtcgtcccaggttcctgacgaacagagaggcgtcgggcattcagcccgtgcgagggctcacggcgtgcgtctcgactatctgattgacacacagggccagattttcagctgactggcatcagtctctcccttgtgcatcgacgccatccttccagtgcgatcctcataaattccgcgaccgacgccttcggccggccgcccgacttcaagcggtacgccgatccgaagccagccgacgagccagatgttggcgccagcccagtgccagtgagcgctcccgcagttgtaggccgagccaagttgtagcaggctaaggaagtggctgcacgcgcagatttgatgttgtacctcggcaggccaagttgcaagtgaaaggcaaacggttgggtgctctggactgacagtcgcagcgaccacgctgcgccaacgaggtctttagatgtggcaccaatctcggcgagacggtagcgagccagcgtctgagttggcgagacgtgtcagtgccctgaccactggggcctaagcagcctgagcggcctgagatgcccgagtcgcctgaatcgcctaagtcgcgagagtcgcctgagttgcctgagcgccccgagcgtcagccgcaaagggagtgacctatcgcctcgacgctccccacagcccagccgtcgcacgaagtccggcagaccgacaaggatccacgctgtcagcctagcggaagagggttaggggagggacagggaagcaggccagtccggtatcatgtccgctcagggtcaagccaggcgctcgtgccgatctcgcctacgcgtccctctgctgggtgctgggcgtcatcggcccagttcaccaggaggcaggcgtcggcgggcaacgacagcatggacggctgagggggggcaggaaggaggctgagcgcgcgcggagaagacgcggcggcggcacgcgcagcagccctcaccacggacccatcacgccccagcacaacgaaggcaggcgagacatgccatggctgtcggtttatgaaggcagcagagaatggccggctcggaagagcggcgcgcgcagcgcctggcccagcccgccgccgcctcccagcccggcccggcctccctactccaacacctctcgaaccgtcgttcagaagtcatgggcatcgccggcagccatccaacacggcagcgcattaaacgtagccggccttgttggcgacgtcaagcgcgtcaaactcgggcgagaggcgcgcgtaggccttcttgcgaccgtcggggcggatgagcgtgttaatcttgacagtgtcgacctcatacagcttcttgatcgcgtccttgatctggcgcttgttcgacttgacgtcgacaatgaagacaagggtgttgtgctcctcgatcttctgctcggcgagcgagccagaggagggcacggtcagcaggggccaccgcaccgattgacagcgcggctcgcaccttcatggccgactcggtggcaagggggtgaacgatcgtgcggaactcgtccatgcggggagcatgggggatcgacttccgggggtacttaggcttacgcgcaagacggagggtcttgggccggtggaacgagacggaggtacgcgtcttcttgtggccgtgcgagttggtgcccttgagggcagccttcttcgcggccttggccttggcgtcgacaggcgaggctgcaagagagaagcgcacagcgtcagcgaccgtccttggcagagactaggtcgcaagcagcaacggcagcagcagcgagagctcccccgttcgaccccagctcaacccgaccggcggcacgaccaggcacactcgcgccgactgcacgttgcggccagcgtgcgtgtcctaagtgcccgcagagcgttggacgaggatccagaggatgaagggcaagccctcaacctagcccaaccgtccggcagcgtgccatgagaccgcgagcgcccggtcgacctccccgagagcgatgcctagggcacacagccgtcctgcgccggggccagcacccaggtccaatcctcccctgctcgagcggagcggcctggctgagcgggcgccactagcgcttgtgcttgagtgcctgctccagcccagggccgccgtgctccgagcatgcgcctgcgctgctgctggctgccggttgctgctgctgctggttcaagaaggcggcaagggctcacccttcttgccggcggcagtcttggtagtagcggacatggctggaaggaggggggacaagacgatgagtgcgagtcgaagcagaggttcgaggttcgggcgagcaagcgttgaggtcggcggcgaggcacgcggcggcggaggttttggcaggggattgaggcagcaaggtcagccgtccacccctcggaacgagaccggtatcgatcggaccagcacgaagatgcagcgtctgtgctgctgccggcgccatgcagagctcgacttgacgcacctgacttcttgaggatggactgggaggacgacaggctagcaggcgacgtgctcgtcggctcagctcggaggagtcgctgcgccgcggagagttgcttgggtttgtgccccgacagaaagccacggggtagtgacagccgttttcaggcaagccggccctcagcaacaggcaggcttgaccagagtctggtcatgctagtcgcgcgttagcgggccgagatgagaatgagagcaaagcagagagcacgagggtagcaagacgctgcaattagaggagccgtcgctgcccgccgagagctgtgcgctgagattgtcatcttggatcggtctcagatctacagcatcgagggctggggtgtgggagagaggatagagggtggaaagtagggcatgcgtgcagcgtcaaaaaaggaaaagaaaaaaagtgttgatgagagagcagagaggaaccgaagattgaccgcgcgaagagggatgggcagtcgaggagggcaaggaggaggggtgcacgccggtgaaaaggggggcgaggtgcacgagatgccggccgtggagagaagatgatgatcccgctcgcaggagaccgctcggccccgcaatagaggcagagcgagaaagagaaggtgatggagggcaggcagtgattaggccttgctcttcttgtccttcttctccttcttgtccttcttctccttcttggcgggggacgcctcgccctctgccggcgcctgaagcgagaaggaagacaattcagctcagcggtctcgaacgcccacaaacgacgctcgcaggacgcacctcggccttcgacttcttcttcttgggcttctcctcctcagctgccggcgcggcgtcgacgtccatcgactcggcaacctccgactgtggattcgcaaggcacgtcagtctatgtacgacacagtgacctgaaaaagcggcagccaccgaccttgcgcttctttttcttgtcctttttctcggccttgacgaccgtctcgatggtgtcaccgacgagcgccttgacctcagccaggacaggcagctcaccctcgccgcccttcttgctcttcttctccttcgaccgcttcttctcgtcggcctcgatctgggcgacagcctccgaagcctcagcctcggtcatctcggcgtcatcgttgtcgtcggcatcctcatccatggcgatggcctcgagcgccttcttgatggcgtcagagttcttcgagacagcggtgcccgactcgtagaacgcaagacgctcctcgacctgggcgcggagggcctctccaaacttgttggtggggacgtctagtggcgcgcaaagagcagacggtcagcgcgaggtcccggacgtggacggcggagcgccggcattaatggacaagatgaaacgcacccgagaagcagtcgatacgagcggcaatcgagcacttgttggcgaggaaacgcgaaatgcgacccttgtgtttggcaccggcgcggccaatgaaggtcgagtggtagagaagaccgtactgtaaggtggggtgaagggggaggcacgtcagacccgagggcgccgcacagtcaacagtggccaggttcaaccgacgcaccttgggcgtgttgcccttggtcttgagcgcgcggaagagggccttctcggcgccgaggatctggaccgtcgaggcggggtacttggcgaggttggtgagcgaaccggcgtgcgagatgagccgggcgccgatcgtctcgccgaggagggccgacaggttgggcgcgacgaggtgcatcttctcaatcaggtaggccttgagcgccttgcggtagtttgacaggttgaccacgcggtcggcaaagttggagatgttgatgaggtcgatcggcgagatgtcggagcccatcgaggcgcgcgcgccgtcgaggacgttgcgggcccgcgtctcgtcgtcgtcaagaatctcctggatgtcctcgaggtcctcctcagacagccgcgacttgtcgccgatcaactttgcgagctgggcgtactggtggttgtcggggcagatcttgacgagctcggggaaatgccagccgtaccactcccggacccgcatggcgaacgtgttgacgtccttgtcgagctggtccgagagcgcgatggcctggatgatcatgttgtcggaccggttgacgttgaactggcaggcgcaaagaggatcgcaaggggggtgggtcagcgttgggtgtcgacagggatgtgcatgcgtgcacatgtgcgcagccgtctccggccagacgagacgacgaggacgagaacgacggctcactgacctttaccttcgcacgcgagtacgagtggccgagaccaagctgggccttcatgacgtcccccgactccatgcccttgagcatcttctcggcgtgcagccggacgccacggatgagctcgagcgcgctgacgccggcgtcgcagtcgatgccgagctcggccttgattgaaccgcccaggttcttctcctccacgccgagcagaacgttgatggccgccgaggacgaggccgccttgctcgacgacttcgagaggttaagctcgagcagcgaggcaaggtgcgggttcaggacgcctgacgaggagcgcgaccgggaacggggtgagcgtcagcgacctgcgacagataagcgctctggaacaagcagcacgctgctgtccgaccgcttcccttcgacagagagcctgtgatcacacctaggagggtggctgaggccggccgccattcaggccggcaagctgagtacgagcggccggctgcccgagctgacagcgggcgtggccgcctcgtctggcacctgcagcaaccctttgccccctccccctcgacagttgcccactccccctcaacagtgacacctagaggcaacgggacgcaccctccgagacgtcgttggcgttctcgagcgcgtgggcggcgctctggaacggcgcaaaagacttgagctggaccatctggccgaacttgtgcaggtcggcgaccgagtcctggaactgcttggtcgtgttggcgacctcgtcgtggagcgacacctggaagagcgcgtacccggaggccgactcgtacaggatgtgagagagcgctggcatcgggggcgagctgtttgggggggtgagggaagagagtgctggtcctggtccgggtcaaggctggctggctctctctctctccgaacggcggcgcgggcggccaggcgctgcggcaggcgtccgaaattctttggcgcctggcggcgaagagtttcgaccgccgcgagccagatccaaccggggcttcaaacctgggcgcgcgcgcgcgcaggtcgccaacttcttgaacaacgactcatggcacatggtgcacttggctcgagctgagacgagagcatgaggtcgggtggcgctgtcagagcttaggagcggcagggggggggggggcagaggggcgtttgcggacctgcttgagctgtaagatgttggctgccgtgcctctgtcgtgaggggtgtcggatacagggcgctcagcatgatgtagagggacgatgacaggcggcaggccggcctcacccaaaggccaagaaaccgaacgggccgaagtagcggaccacctcgaggagtcgggcggtcagcgggcgccgtttcagtagcacctgcacgggctggtccatctcctgctcgcgcatgatgaggccgtcaatgtcggccgaacagctcagccgacaggtcggacgacgggacagacctgagcctggagagtgcccgggaggcggctggcagaggcggtcgacccgtaggcctggcgcgacgtgacggacatggcagggcaacctgtggttagagcgagtgaacgtcgtcgtcgtacttgccgccgcccgccgacgtctggcagactttttgagaggcgagagaccgagcttgtcgggcaagggaaggggatggcgtgcctcccgctctttatcgcgcctgctggtcagggcgggagcaaggcgaggcttccgtacccgggcccgaagcttcagcagccccgagtcagtacatgaaagagcggcttcaggagcgaggcaagtggattgtgcgaattgctgctcttgagcagcttgagcagcaaagcagcaggggaggcgagcagatgaacggcaggggccaggagagggacgtcgtcgagctcagccaagttggcgacgccttcactgccaacgctcgcttgcttgcctgtcactcccgcccccttccctccatctgtatggcctcctcgtcctccctgccgcctggtgtggacctatcggctgccctgtcgtcctacctgtcgaccaagccccggccgtccgtccagtcgttcgccaacgcgttgtcggcaggcgagctcgcgcatcccgacggtcgcaacacgcgccgcatctactgccccagggacggctgtggctgtctgatccttcgtgctggggatgctcagtggagggaaggaatcaagggtgtcgtacgtctgatcgcttgctgcggcgaggtcgaaagatagctgccgggctgactggcagcgctgcctttgctccccttgccgccgcgagcagtacaactcagctggaccgttccccgaggcgccggcgtcgacgacggcgtctgcctcgtcgcagccctactggttcgttgacagctcgccgatgggcttcgaaaacgtcggcttctcgcgcaacctgccggcgtcgcatgtcttgcctgacggcctgccgaacggcaacctcaagtacctcatctgcgccgactgcgacctcggcccgctcggctggacgaccgacggcagcaaagaggcttggcttggtgtcgagcgtgtccgctacggaccggtcgagggcgcctagtctggtcatcgtcgagaccaaccgctcgacgcccgatcccaacgcgtgcaatcgctcggcccgagccagtttcacacgagctgcacccgctgcccacgcgtgacaggggtctcgaggaaccttcagggtcctctatcggttcgcgtctcgtacactcctctcttgagggagggctagcacaggagggaggcccgatcgagaggtcagcgcacggaacagcgtcgacgtgcgcccgcgcgaccctctcctggtcgattcgagcgctgccgggtgtagaagctcttctagatgaactcttccataccctcgtcgcttcccacgacacgagaggctgtacagcgaacgatgagaggcgactggcccatctgccttcgcccgcgcgaaaaggggctcgagccgcaagccgccgtcgtcgcgcctcctctctctcttcgccgccgcccttcatcgcttacgagctgcccctccgacgtcgacgcccccagctctcgtcagtcgctagatcttgctctctcctagacaagttgctcgcaggtcgagctcccggtcgatttctgtcgctcgctagctcccgcctgccggccgtcgctcgcgcccggctgcctcagccctcggctcgcctcgccgctctccgacctctcgcgggctcaacttccccgcttcggctggacccaggccttgccactagccaagaactcgtctgtggccatcaaggtgagttcatgccctaaaagcgatgctgggcgactgccaggtcagcgggcgtcaggcccggcggccgtcagctcccaccaaccgggcggcgtcgacctcgccttgccagtacctcgccagagagggcgaccagtctagccaaccttggctcatcaggcacagctcttgagctcgcacagtacagcgtctagccgttgactgagctgcttgagctgaccgcggctcgccttcccgtccctttcagctccggcgctcgtgccccttcagctcgctcgtctgtgctcctccccctcccagctcgcccgcccacgctctccttccctttcatgaccgactcgaggtcttcggccggcaagggccgcgcgcggggcgagtcggtcagcggcgtcgatgtgcctcctgccgaggacgccgcggtcgagcagaactcggtcgtcctcaaggtcggcatcctcggcgacgcgcagatcggcaagacgtcgttgatggtccggtacaccgagggatcgttcgagtgagctcgacaactattgcttgatctgctgagctttggctgaccacgagcttctgctgctctgcagcgatgactacatccagacgctcggcgtcaactttatggagaagtcgattcgaatccgcaacaccgagatcaccttctcggtcggtccgctctcgccgtatgctgcgttgcacgccgtcgctaacggttccgccgccttgacagatatgggacctcggaggccagcgcgagtttgtcagcatgctgcccatctgctgcaacgacgccgtcgccgtcctctttgccttcgacctcacgcgcaagagcagcctcaactcggtaaaggagtggtaccggcaaagccgtggattcaacaatgtcggtcgccgtctttaagtggtccgacgaggctgattgctgacagcctcacctcctgacagacggcgatcccggtcctggtcggcaccaagtacgacttgttcgctgcgtttccgccgaacgagcaggcagagatcacgaaacaggtgcgcctcactgtcgatgactacctggccttgcgcacgggctgacctcgacgacgccctcctcgtctcggctaggcaaagcgcttctccaaggcgatgcacgcgccactcatcttctgctcgacgatgcacgctatcaacgtccagtgcgtcgctctcgagctccacgccctccaatgcacctttgctgattgcttggctttgttctccctccagaaaaatcttcaaaatcgtcagtcgatgacggctgcttgacctgcctcactcgagctgaccttggcatcgtctccgcaggtcctcgctaaggcgtttgacttgaaatgcactatcccggagatcgacggcgtcgtgcgtcccgccctgacgtctgtccgctcgaatgcagtgctgatgagctgccctttcgatctagggcgagccgattctcctctacgtcgacgtctgatccgacccctcggacgcgcactcggccgagccacgcatggctcgcaacctcttctctctttcatggcctcccagcgggacggccgggactttggctcccataccctctcttactctctctctttccttctcaacacccgccttcgctgcgataccctgttctcctgcctcctcacccaacccatccctgctctgcaatacgctcgctgctttcactgatgcgcccgcgcaggccaatcgtcactcggcagccagcaccggtcgcactccaccttcctctcgctcctgtgctcctccacctcgaccgcaatgtcgtcccttcccggccgtctgttgtctgcgggctcaattggccgctgacgcgtcgtcgtgtgaagggcgcgagtcgatcgccgtcgagaaggctgcggacggaccccaacctttcactgcctcgcttctctcgacgagtcccctcctcttttccttcgcttctccctctcgccctctgattctcgtacctggcctcgctcaaccttcctcgctacgggcgaggtcgtcggagcacgctgacctcgggttcgctcgctcgagagggagttccggccgcgcgagccccttttctagcccctgtttgacgacccctcgccgcctcccttcgagcgctgacctgacgtctcggccaaacacaacactgtcatcacaacgcgcctgctttcggagtacgaaaaagggcacgcgcgggcacgtgaggtcgggcagctggccgcctcacctccttgacagtcgacgaccaccctcacgaccgacccgacccgacacgtccaagcaagagacactcgacaagcttcaatctcgctgtccggcggaaagctcgcctgtcgctcaaggcagcgtctgctcgctcgctccagctcgcatcctccccgggcgccagccaacgagagcctgcctccgctcctgccctcacgtcctccccttccgcctccgcccttacgacgaccgaccgacacgacgagcccgccgaccgaacgatctagcacgccgacctcgccccaaccacgtccgacctctctcctcgagcccgctgctttcgcctccgccgccactcgagcccctcacctcgctcagcccatcttgacgcccgaccccctcacctcgcaagggcccagcctggtccctcaacctcctcacgacccctctctcaactcacgacccttgacatgacacgcaaaactcagtcggcgctccgaccccgacaggcatcggcagcgcctcaagcgcctcagccagcctccgtcttgaatttcccaaggccgatcctccggccggtctcggacccctcgcctggcgcgccggcgaccgccaagacggccggcaaaacgtccaaggggcccttctcgagcctcacctttgccgctggcacggccttccccgacggaggcggcgcaaagaagtcgcgcaagggcgtcctcggcttctttcagcagcacaagaaggagggcagcgagtgagtctcaatcgcacgccacccctcttccgctccagctgaccgatccttgcggccctctttctaccagcgcctcgtcgctcggctactcgtcgtccggttttgacaccgcctcgaccgcctcgggctcatctgacctgccaacgccgacctcgccgacctttgccgaccttgacggtcaccgccttcagaagggcagcatcggccgcgggctctggggccggctgaccggcaccgtccgcgaacacaagtcgagcacgacgtcgaccaagctcaagccggtcggctcgacgaaagctgcaatcgcctcctttggtcagtccccgttcgtcttggccaaaaaaatgatttgcagctgaccttatgcctctccttgctctctaggccgcccggcagtcgccttcccgggcagcctgtcgcacgcacctccgttcccggcaaagcgcgtcggctcgacgacgatcaacgcacctgttgagcgactcgctccgcccaagacgctctcatccgtcttccagcctgagcagccgccgtctttgcgctccggcaagcctcggacgctgagctcggctggacccctgagccggccgccgcttggcaacatctttctcggccccctgcatacgtcgcccgaccgccggccgacctcgatggaccaagccgctcgcaccgaaatggcccctgacggcctcgaggctgtcgtcgccagcggtttcgagagccttcgcgtccggacgatctcgcgggccgagccacgtacgcggagccggccgagcgccgacgccttcgcggcccctatgcctcgcgacggtgcgtagtcctgacctcccttcggcttttgcgtcgcaacttcctgctgatgaccttccttcccctctgacagacgagatgcgccagcgctccctgtcggtcatcaacaaggccaatcggacgctgctcgacctggtcgctcggctcgaccagtgcccaccctcgccggaagcctcaccgctgaaggcgacagcggcagacccagcaccacactcgcctctgacgctccgcaagacgtccaacaaggccagcacccagtctctgctcttcctccgcaagcccaagctggccggccggcgtcttgtgcctaaggcctcgcgactccaggcgccgctgcccgacctcccgccggccgtcaacgtcgtcatggagaaggccggcgtcgacttcgtcccgggcgctgcgcccatcggcttcggtcagacggtcggcgccgagcaggtcgtgcagtcgaacagcgacctcgactcggatggcgagccggccctccctgagtcagacgttcccgacgatctcctcgagctcatctctgagcaaggcgaaggctcgaagcgcgggagcggctcttggtccgaccaatcggcgactccgccgctgcccatcctcggccttcctcttccaccgccgccgaaccgcgtctcgccccggcgcaacaacggcctcacgctcgaggtcccgcctctgcggatctcgtcctggcacagccgcggtcagaagtcgtcggacgacacgagcgctttcgccagcccggacgcccgtgactcggccaccttcgacttcaccggcgagatcaggcagctcaacgagaatgcccgcgccagcttctttgacaccttgcacggcgcagacacggcacccgtcttcccgagcctcgctcagcaggcggcgctcgccgaggccgagtctggcgtcgccatcctcgcctacaagacgggcaaggtctcatctgcgtcgtctggcaactcgacccctcttggtgcgctcaaccgcgacttccggcttggctcccgcccaccgtcgcactcgccgccctccgtcctcagcggctcgcgaccgagctttgaggcgccgctcttccgcgtcagcgcaccgacgccgctcccgcccggatcgactaccttggacgacgcccggagcacaaccttcggcgactcgagcggcatctctgccgaggagctcgaagcggccgacgtcttgccggacgagtcgttcgccgaatcgaagcgtctgagcctcctttccgacagcagcacgacccaccgcggccaccgccggaccggccacggcgacagcgcagcctcgttcgcgtccttcggctccatctcgagcgtcggccaggtcatccacccgggctcgcgtcaccccttcagctttgaccacagccagtcgtttggggacgactcgctctcgcccgacgactcgcgtgacagcagcgagagcgcgcgcacgcgcaaggagtccgagatcagcgtcctgacgcagtcgtcctttggcgcgcccctcgtcgacggccaccgtgagtgtcgtctcgcaccccctgtcgtggagcttcgctgacattcagagacccccgctgcttcaggcatctcggcgctcttcgagttctcgagtttccgaaacggccattcgtccggcttctcccgtcacggccacaacgactcaattaacagcgccacctcaaccttctcattccacgcgccgtcggctgacctcgcccaccgccggaactcgtctgtcgcgagcacggttgagcctggcgagccgcactcggcggtcgcgaccggcccgccaatctcgcttttcaaccagacgaggccgtacaagtggaagggccagcggcacgctcgcagcggctcgaccgactctgtgctctcctcccggtcgtcagtccctcggatcccgcgggcgaccggccggccagactgggcccggcacaaccggcagcaatcgtcggccgacagctccttctcggccactcttgccgctggccgtccgggcctcggcgaccgcatgttctcgcccgaccaggcggtaccgctctttccgatctcggcctcgccccagggctcgcccgacgactcgttccggtccgactcgttccagctcgagctgcgcgagcacgaggtggccgctcactccgactcgtccgactcgctctcggtcgacgagtgccggacgtctatcgactcgggcttcccgacgtaccgcttcgtgcacgagcgcgcaccgtcgctcgaagagtcggccgagtcggtctttggcgccggcgacgactcgttcctccggcccttcaaccccaagggccggccgctcagcggcgccagcatgttcagctcggatggcgacgtcgacccagagaacgatacgttcgccttcaagcgcgcgacccggcccgaagagctcgagctccggctgcccgttctggggcagacacacgacaaggagcggccggtcagcatgctcagcaccggcacgagcgaggccgactttgatgacacctttgcgttccacaacggcgagacgcacatcatcgagcccgggcgctacacgctgcccgtgcttcgcgccgagatcaagccacgcctgtcgccccaggcttcgccgttgcgtgtgaagcgcaaagacgagcacgatgacatcggccgtgcccgcaaggcccggctcgtgtcgtacacagccgacgcgtcaacccacggccaaggcctcaaggagcgtctcagcctcgaggacagctgcctgacggccaacggcgaggacgcttctttcaactcgagcggtacgtcgggggatgcgtctgaccgacaacgtctgcgtcgctgactctcttccgcctctccttctcttccagacctcgctcacttctgccaggcctttcacatcagcgccccgagcaacctcctcgccaagcctcgcgcttcggtctcaggcaagcgagcggcagccggtcagaagctgcggccgccgacgctcacgttcagcccggacgcgccggtcgcctcgccgctcctgatggccgactcgatggggaccgactcgtctcgcctgttgctcaacctccggcagctcagcctggactcatccgcgacgtcgccggccggcacgactcgcaagcccaagtttgtccccggccaccgctcgcgcctctcgggcccgtcggcctcggtcctcgtccacgcgaccatcccagaggagcagccctacgacgggccggtggcgacgacaggcactgggacgcccggcctttcgtgctcgccggcgtcgtcgcccctgagcgacgcttacgacttcccctcgccgatctttcttctcagccgcgagcccgacattgtcgcctttgacgacgaccccgactcattcgaggcgatccgcggctggcggacgtgggagcgcgacgcgcagtacgagtacggccgcagccaggcaatgtgggccgacaccaacctctcttttgaggagctcgcccgtcagtggtcgttcacttgacaaactttgttagcgcgtgctgaccaccctcctttgaccttgcagacttcacgccgcccaagaagctctcgcaggtgcaggctttcgtccaggagaggtgagcgtcttctagtcccctctccgactgcccgttttactgacgttctcctcctcgcacacccagctcccgctcatacaagcggctctccggctcgttcctcaagcacaaatggtcatcctcgcgcaccgacgcccgcctccacgcgagcccgtacttcgtcgcgcccgagccggtcgtcccagccaagaccaagacgcgcgcgggcaagctccggccgacgtcgatcaagaccaagtttgccggcgtcgacatcgacgcccagccagagtcggcccggctcgcctcggccaaatttgcggccttcgctccccttccgccggcgtcggcttcgaccttcacgacgacccggccgccgagctcgccgccgagcctcgccgtctttgcgcccctgagcccgctcaaagtctcgttcctgaccgagcaggccgccaacgtccccggagcgccggcgccgccgaacgagacgctcgaaaaaaaggcccggcgtgtcagctcaaacgtccggcgcgagcgcctcggctggggccggcgcaagacgtcggtcgaccacggcggtgaccttgtgccggtcaagtcgaagcggtcgagcctccagatccagtgcgtcgcttcaaccactagtcccctcttggtccaaaactgaccttcctcccttaccttaggcgcgacgctcctgccgtcttgaccaagttgcggccggcaagcctcactaacaaggagaacgtcgccggcggcctcggccccttaaggtgcgcaatcgcctcgacgagcagtctctgcactcacagtaactaacggccgttcctctgcctgcctgcagcgtccgccctcgcgccttccgcacgaccgccggaacggcgatgcatcgggccgctcctcttcgggcctgaccgcttgcccctttacgaacccaccactctctcacgacccgcgcgccaccaaccgtctctcgcgccacctcccctcgccatcaagaaacgtccgactaacgaatcgctccttctgtcttccacgtcatcacgacgcatctcgcacgcccgcctctcacgtctctctctctcgcccctctgcagtctccttctccatagcgcagatgcgcagcgccacctcctccctcctctttgcttcctgtcacgaccctcactcacgaaacgtcctcctttccatcgcatccatcccgccgagctacctcccgtctactctcctccgttcgcttcgtcaaaagccctctgaggcacctcttgttctcctctccatcccctttcgcgcgccaccaccgtctcacacgtaacgtcctccttctcgaatgaccccggcgccacctctgcgctaccacctccttctcttctgctttcgcgcaagccggctcgtcaagggaagggaagggaaagcacgagaaccgaccgggcgcttgcgatctcctcgaacgggcaaaagagagagaaaaatagaaagagtcacatccaccttctcggcgcccgcctagtagcctccccggcccctcggcgcaccgccccgtcctcctcctccgaagccgccccggccgcgcggcgcgccccgaccaccaccgaagctgctgccgccgcgcggccggggcggcttcggaggaggaggacggggcggtgcgccgaggggccggggaggctactaggcgggcgccgagaaggtggccctagagacctgtcaacccccctcaccatcgtgtatccttttcgcaaagcgtttcccttctaccccttcgccctccttacgtcaacccaactccctttttgcccgcccatcatcatgacccccccaattgccctgcctaccagcgtatcggcacgctatgtcaatcgggtcttggacagcatagcgctctgcggatgtgttagcggcggatcttgcgcccttcattgccgtcgcgagcggtccccgactgcttgtctgaccctcattccgtgcaccggccagcgtgggccctggaggctctcgtgacccatctctgtcggcgacgacacttgcctgccgaaccggcgccgagtacgctgtgtcgcacctttctactctacttgtacatacagcgacctcaaggcagactggcggatcgcttcagggccggaaacggcctgggccgggctatgagttgtcggcgcaagtaaagggttgggtgccgcctgctttaagggcattcttgatgtcgacgacgctcgcgtatgtctgccgggaagagcgcaggataaaggtcctttagagtcagccctctgcgcctcttgagacttatccaatgcgagcgagcgctggagactcacgcctgcgaccatgaggaatgtgccgcacgcgatgacgacgagattccaggcaaagaggagcctgaagcgggccgtcttgtcaaccgagcggagatgccaattgtcgtagaggtagcaggcgccctgagacatcggcagtcgggggtcagagaggtcgccagacaagagggagcagcagacggaccatcaggtgcatcgtcaggagcgttccaaatacggagccgatgatgccgatgagcgagttgaatacggggatcgcactgcggtagaacgttaaggcatgcaacgacagtcagtgcgccggttgagttcaacggccgtggcaagcttgccgcacctcgcgatgatgtacgagcagatgacgcagccgaacgtgcaggcgagccaggtcgaccagtgccggagagagttactcgtcaggtgctcggtcccgcggaggacgcggacaaagatgagcttggccgggagctgtaacaaatgcgcgagacagtcagcgagggagctctgacgattcaaggaagttcgttgggtagggacagacatgggtgaagaggatggccgtgatgaggagtccgggcatcgctagaccgtagcagatgcgcttcatgaggatgcctgcgctgccgagggccgggctcgagacgtactggccgacgaacgcatagacgacgacgccgatgatctggcgagggcgcccgacgcggtcagcgctttgaccgagagtttgctaagaaggatgggcctttgcgggagggcgacgtacagtgtaggttgcggtgacgatgaagtgggctgtcagcatcgaccggttgaatagccgaggctggcgcatctcggagacgattccgaagctgccggtgcaagggcaaagtcagcgggatcatctcgagctgactggccgaagcaggagacgcactaggcaggcgtaccgccaaagctgaacaggaggacgctcagcgccgacgcggcctcgaggaacgacgggtttccaaagatgacgaggtccttgtcccagggcccttcctttggcgcttcctccggccggtccgacaccccgaccgagacggcgagcgtaatgacggcggcgaggattgagccgagcccgaaccagccgagccacgagactttgccgagcgtccggatgctcgcgagcaggaaggtgacgacggttgcgactgcaacaaagacggccgtgcaggttccgtggttcgtgatcgagttgagggcgattgacgttccgaggagcgaggcgccagcgacgaagacggaggctggcagcgagtagaggttagtgccgatctgggtaggcggaggccagtggcaggaacgcacagagccagaagaagagggccatgagctcgcgaccaactcggccgccaaggaggaagccgacgtcgtcaacagagtctgtccagaacgagcagggggtcgtcagccaaagcagacgttccagcatgcgcagcgcgacggcgcacagacgtccgggtgcagccgcttgaagcggccgacctggtagtttgcccagccggtgaagctcgacaggccgaggatgcagatgatgcccgggacgatgccgagcgtgatgaggaccatcggaatcgatagcacgccgacgccgagctgcgtcttgatcatgaggaccgaggtgccgagccagccgagctgcaggagcaggcggggcgggcggtaatagggacgagtgagcagacggaaacgagccccgccggaacagcaggacgcgacgtacgttacggtaggcaggtccgtcggcgctgaccttgccccagacagcgtcgtggatctcgccctcctcggggtgctgtgaggggaccttgacgaggccaaggccagcctcgacgaccccgcccgactcgagcgagccgcggcgggtgctagcctcgtcagaccggtacggcttgtcgaccgtcattcgaatttgcgggctaggaaatgtgagggcaagagagaggtcacggagagtcgtgctggcttgcgagctgctgctgcttgaagggttagtcgtcgttcggaggcgagtcaggggtgtccggacggagcagggacgtcggggcctccatttttcgaagggcggcagcggcagtttcgtctcatgaccaatcttggctaggcggcttcgggtcaggaggtcaggtgacgggtcagtgtgttgcaggcttcaggatgtgtgcgggtcgttaagcacgtcgtcggcgacgagcaggaggaggcaagagtgaggcgtcggggctgaagctcgacgtcggaggcaaggacgcaggtttggaacggagcagagaagcccggagccggccggccctgtcgctgagtcgccgcgtgcactcgcgcgtgagtcgccgcgtgcactcgcgcgtgagtcgccgcgttagggctaggtctgtggcgccaggcgcagcgcgcggcgcgctccagcttgtgcctcgtccagcgcccctccaacaaataacgcaacccctcgacgccgcccttaagagacgacagagaaagagaggccgctccctcttttctcgcacaaccatcaccaccacaaccatgtcccagccggcgcgacctgccgccgcgctgattgaggtcgtcctctttggtgcgccctcttgaatcttgccccgcttggcttggtgtcggtcgctgactgccgaccatcctttcttctcctccgcctggcagtgccgaacgctcgtcagtccgctgcgacgccttctatcgcaccactctgagccctcgactgatgattcgctatccctcccgcagactgcccgtcgtgcacgactcacatactcgccctcctcgctggcctgccgctgccgctcgtccagccttccgtcagcttcctcaccaagcgcctcgccttcagtctccctgcctcggatgtcgacatcgcgagcgcgacccggctcgtcgaggcgacgctcgccgacggcggtttcgaggtcgtccggccgtcggccgttgtccttggcgaagacgaggacgacgcagtcggcgccagcccttactttctcacagctgcctccgccaacccctccgccgctgctggtcgaagcagcttcctcgccaggagcgtccttggccgggcctttagcgctcggaaagtccgccggcgggccgaagtcggtcgacggctcgcggacgaccgccgtctacagcatctcgcacactgcctcgactgccagcgcgcgacggccgacggcgcagacgacgacgctgcgcctcacactgccgatgcgccggagggcgatagcgaggcgtttgagctcgccgtcagtcggccgagggaggcccaactggcagagacgacactcagcatcgacggcatgttctgcgcgtgcgtcgaccctttgccgatctctgtgccagtctcgcagctgacgcccgctctcctttcccagcgcgtgcaccaaaaccctgaccgaccttctcgttgctcacccggccgtcacgacggccgaagtcgtcctcctctcaaacgcggccgttatcacgcacgatgccgctggtgtctcgcctgcagagcttgtcgagctcgtcgaggacgccgggtacggcgccgagattgtcaactcgcggccactggaccagcctgctgctatgagcaagcggtcggctacttctgccagcgacgctcagtcgttgcagccgacgtttcggagcacctgggaagtccggggcatgacttgcgcgtgcgtccggggtcgatctacttccctgtgcttttcgtcagaaagccggtgctcattattcctgcctgccttagttcctgctccggctccatcacgaaggcgctcggcaagctccccggcgtcgtctcgtcgtccgtctctgctctccagggatcggccgtcatcgagcatctcgccacgctcgcgccagcggccatcaccgaggccatcgaggacgccggcttcgacgccgagctcgccgagtcgctcgccatcgcccctgcgtctggcctggccgctacggatcctgctggcggctcgagcagtcccgcagcggtctccccgggctcgactgcgggtccgcgcgaggtccgcatccggctcgacggcatgttctgcaacgcctgtgtccgaaaagtcgacgctcatctatcggcgctcatccaagccgcccagatccggtccgcgaccgccatcacccttcagtcgcctctcacgacgatcgtctacgcgccctcgccgagtttcactgtccgcgagctgctcgcaggccttgcggcgctcgaccccgtcttcagcgccgagccctacgccgctccgtcgctctctgctcgggcgcgcgcgatccaggcacgggaggcacgccaactgctcggccactttgcgctcgcggcgctcgcggccgtcccgacgtttgtcatcgctatcgtcggcatggtcctacttccgcgggctcacccgtttaggcgcttctgggatcggccggtttggggcggcgcgagcctcgggaccgtcattctctggatcctcgcgaccatcgtccagtttggcgtcggccggtgcgtgcttcccccgcacgccgctagccttcactccttcttcgcctgacacctggaccctcacttctctcgcagcatcttctacaagcgcgccttccgcccgatcttcgcccacttccgtcgccgctcgtccgccgcgcgcgcaacgagctggtcgtggcgctccctcttctcattcggcagcatggacctcctcgtcgtcctatcgacgacgaccgcctactttgcctcgctcgcgatgctcgtcgttgacgtccggtcgccgcggatgatgatggacgaggaaaagtgcgtctgtggtgcctgctcggtagagctggcaagcgttgtgctgaccttgttcgctcctgaacctcgacctaggaccatgacgctctttgacgcgagtgtcttcttgatcttcttcatcgtgctcggccgatccctcgaaggctgggccaagtcaaaggtcagtctcgcctcgctcgcgctagcgaagtagaacaggaggctgacgtcccttgtggcacttgcagactggcgatgcgatcgcgctgctcggcacgctccggcccgacacggccttgcttttggcaccgacctcagagctcggccagcatggctcgcccgacgtcgcaggctcactcagtctcaagccgacggtctcaacctctagcgccggcacgctctttgcgaaggagaacacgctcccttgctcgccagctgagctcgccgcatcgtcccttgcgccctccgcgggttcggcaacaactgagattgccgtttcgcacctcgagctcggcgaccacgtcctcgtccgaccgggcgcgctcccgccatcggacgggacgattgtccgcggccagacggcctttgacgagtcgtcgctgactggcgaggctcggcccgtcgctaagcgggtcggcgacgtcgtcctgaccgggaccgtcaacgtcggccgtgaggccgtcgtcgtccgcgtcgactcgctcggcgaggacacgatgctcgcccggatcggaaaggcggtcgagggcgccatgtcaggcaagagtcggatcgaggagctggccgagcgcatcaccggcgtctttgtgccctgtgtcgtgcgtcaatccgccttctctgcttgggtcccactggcctcggctgacatgacctctttcgcaggtctactttgctctgactgtcctcgcggtctggctcggcctgacgctgagcggccggatccccgacaactggatcaaggctcacgacatcccgacgaccggcgaccgagtcttctgggcgttcgagttctgcatcgccgtcagtgcctcacaccagctattctctgccgaaacgaaagctcacctctattccctcttcccgctcggcaggtcctcgtcgtcgcttgcccctgtggcatcggcctggccgcgccaaccgctacggccgtcggactcggtctggccgcccaggctggcgtgctggcccagggcggcggctctgccttccaggccgcgactaaggtcgacacggtcgtctttgacaagtgcgccgctggtcaagtctctggcttggatctctctgcttggcactgacttctgctgccgcctcccccaggaccggtaccctcacgacgggtaagcctgccgtcaccgactacgactacagatcgtcctatgtccttcgtggactctgcgaccccgcggacccaaaggcagcaaacgaccggcgcttcctcctgactgctctgcgcgagctcgagtcgcagtcgtcccacccgctcgcatccgccctccaggctttcgccgatgagcagctcgcgctcctccccgcgacggcctcgaccggcgcgttcttctctgccggagcgtccgaggagattgtcggccgcggtctcaaggcggtcgtcacgtcgagcgtcgccggacagtcgcccgttcggttcgaggtctgcgtcggcaacgaggcgctgatgacgaccgtcggcgccgccctcgcgaccggccccctcatccagcaatggaaggagggcgcaaagtcggtcgtcctcctcgcggccaagcggctgacaatgtccggcgacactggccagacgggcacgtatgaggtctgcgccagctttgccgtcgccgacccgctccggcccgaagccgcagagacaattgccaaactgcggaaggcgggcaaggaggtctggctctgcagtggcgacaacccggtgaccgctcgagcggttgctcggcaaggtacgtctccttcgtctgccctctcgccaacgactgtcgctgaccaggtcttcttgatgcgcctagtcggcattcctgacgactgcgtcatcgccggcgtccttcccgagggcaaggccgagcacatcaacaagctcaagggaatgccggcgctcgtcaaaggttcgacaataggtcggtttattctcatggctggcgacggcacgaatgacgcggtcgcgctcgccgctgccgatgttgggttcgtgaatatttgagccttccagcccttcgaaaggcaccttgctgacgccctccttccctcgctcagcgtcgccatgggctcgggctcgcaggtctcggtcgtctctgccgatttcgtcctgctcaactcgtcgctcgactcgatccacaagctgctcgacatcagtcgccgcgtcctcaaccggaccaagctcaacttctgctgggcgctcgtcttcaacctcgtctgcctcccgctcgccggcggcgtcttcatggccgccggccggaccaagcttgcgcccgtctggtcggcgctggcgatggcactctcatccgtctcggtcgtcatgagctcgctcgcgctgaagtggggcatctgatcgcttcatggcatgcaatcccctttttgcaactcttcgcgtgtgcgccagaaggacggtcaattgtcatgcgagccagcgcagggaatggagagagaggagcgaaccgatgatgcggagagagcgcagtgcgagcacgagaaggctgagaggcaacgaggacaaggacacgcgaacgggctcagaaggccacactcgtgcgtcttaggcgacgcaattcggccgcccggttctcacgtggagccagctgggagattggcgaagggccgccccgcttggccgagacagagggcggtcgtaccgtctggctgtcgacaggtgtgactgctcccggccgagagacggcaggtgccgggcggaatgatgacggcgcgtgcgaggccgccggccgtcctgcgactgaggcgcggctgatcactgaggtagagcgactgaggccacctggccgagcgtctgccgttgagcccgtgcgcggtggtggctggatcgtgctgctgtcgctagggttgctcgctttgataatcgccgcctggctcgagcgcaggagggccgcccggttctggcgaggcgcaatggtgggcgcggtcgtcgttgactgcacgaggatcgactgacgccgcttgtgaccgggcacgtcggcaaacgtctcgtgtgccataacggcggagggcgcgagtgcgtacgtggatcgcaggagcgcaaagtgcggtcgtcgggtgagaagggccggaccgtccgctgcggtgaccgtcgcactcgacactgacgctgtgaggggctcgcactcagcctcggcgatgctggcgtggctgacagaagtcgaggaggtcaatcgcaagagtctagcggccggtgggaggagtgacgtccgccggtgcagaatggcagagtcactcgacccactcttcactcgagggacaagcgagacgacggccgccgaaggtgcgacagacgacctccggcgctcggcctttttctggagctcgagcttgacgcgctcggctcgagctgcaatcttctgctgctcgagagcctggtacacctggccggccgcgtcgtcttttgctctcagcgaggacgcgcgtgtcgaccgaggcacgaccgacggaggaagcgtcgaggcgaccgagatcgtctcggaccggcggtggccgggcgtgtgagcatacagatgggcctgagcagccaggttgtcggttgacatgcgccggagcggtgccggggccttgccttgccggatgagcgacgcccgggtctcgcgaggcgagacgattggtgccttcaacgaggcgacgtcgagctgaaggttcgagcgcgagcgtttgtggcctgacgggtaattatacagtcagctctctgggactcgttcgagcaggagcgacagaaacgcacctggaacggcggtgaagtcagtcaggacgtgcgcggctcccttgccgctccccgtgctcgagccgagagagtccgggtcggcaccggccctcagcagagaggcacgcgattgccgcactcggtgctccggagcccaggtcgtcggtggtgctggccgggctttgaacgactggccggtcgaccgactgagcaagtgcgagtcggtggatgagcgaccactttcagcgtctctgcggtcgacgcggcctgtattgtcaacagtcgctgaagcagactcggcaggggccagactgggcgcagctgtatcatccgcttctatcgacaactggctgagggaagccatcgttcgccgatgctggacgtcccggagcggcggcggttcctcgggcgtcgtgcttctatcgcgctcgtccatccagcgcgacccgggcggccggcccgagatcagcggcgagtcgtccggattgccctcgttgcgcgcgagcgagcggatccggtgcgcgaagatgaggttggccggcgttggcgtcgcaagcgagagggtcggtgagatgcgcgagctgacggccagttggctcccggagtcaggagtcgtaggctgaagatacgcaagcaggcgaggacgatagtcagcgaccgccagctgtaccacgctacagccatctggatggaggggcctttatctcgcagccaagatgcgttgaccagagcggctgtcgaccgacaggggctggaaggcgcctgccggcacgattcgcagccacactcccacccccagctcccgcctcatcagcagcggcagacgacgaaccaaagcagcagacggaggggacaacttgtcgtccatgtcaagtgctcggtagtaggaggtttggaggaaacgtggatctggaggaagcgggtgacgaggaggaaggcgagggcgagcaggtcagcgatgacggagcgcgggccgagtccctcgaggtcacgtaccggacgacgtcggatgttgaaggaggccgtttcctggcgagggctgatactggtccgttctgggtcggttttcgttgaaggaaaggaacggcaagctcggtcggagcttgggagcgaagggctggctgctgccttcgcgccgtcgctcgctccaagcgacctcctcccctttgatcagccagtgtttcagcgtttcagcccctaacgacgacttccggcactccggccgaccaaccacggcccacgctctccctcgcagggccacaataaagggtgagaatcatcgaatggaagcggaacgggttgaggttgcgccaatgaaggcgtccccggtgtggctagaaagggaggatggggaaggggagggcgtcgctcggaggagccagataaaccggtcgggactacgcaaggcaacggaaagacgcatagggtgaagcgcgggcgcgggcgaaagaacggatcaaggagcgacgtgaggggagcgatctaaggtgggggggaggtaagctcaagccgaggtggcgggagcggcagcctcggcggcgggggcgtccgactcagcggccggggcagcggcggcaggggcggcgggcgcgccggcctgctcctgctgcgaccactgctcgaggacggccatggcctcctggaccttggccaggagggcctcgggcgtctcaatgaggtggaggagctccatgatgtccctaaaggggcgccagaaaaggcaggttagcgataggtcggaaacaacagcgagcgagcgttggcgtgacgcacatctcgaggagcatgccggtgatcttgccggcaaggggctcgttgatggcagcgaagggcgggcaggcgagaggcggcgacggttggtggcgcgcgtcgagcacgtcagcgtgcacagcctgtaacaggcggacaggcgacgacgagccggcctgcaaaccaagcaggatagaggtagtggccgaggtttggacttgtgtcggcccgaccctcggcttgtaccccttctccggcatccaccggccggccgtgccgcccaagcccctgctccgtcatcgccgctccctctgccctgctctgcgctgccagccttgtaggagaagaggaaggaggggccgtaccgcttcttgaggtcaacgtcggccttcttgcagacgatgttcgcgtaacggcggccgacacccttgatctcggtcagggcgtacatgatcttgcggcgaccatcgacgttggtgttcagcagccgcagaatgtgctggaactgcacgtgggcctcaggagcgacgaaagacctgcacgtcagacgagcgtggtcagccttggtatcgaggtggacgaggtcgcagctccggccctccccacgcatgacgctcccagacgctgctcgttcccaaggtcctggtctccccttctagcggtcgtgcctaggtggagagaagaggtccaaggtcccggccagatggcctgcaaggacctggtccctcctgctcaggcaatgcttgtggtgcggcccagctcgaccaccacctgccgagctcaagcctgccggtgcagcccgagctccaaaggcgcgacgactcctccgaagaccagaaccgaatggcaagcaggtagggagctgttgcgagagagctgcaagggagaaaggagggagtgaggcgtgatacgaacatcttgacgggtggtgcttgcgagtacggggagtccaaggggcaggaagcgaggttgagcacaggcacggagcagagcaggcggagcggcggcggcggcggcggcggcgccagcgcgcgggcggccagcccagccagagccagcgcagggcggccgcgcggggccgcatcaggactgggtctgggaacctgggcccgcccgccgcgctttaaggcggtcgggcctctcgtccccagactttgggcatatgaattagggtcggctcaggacgtcaaaaggatcagcgatgatctctctgatctgcaatcaaagtcggctttgcaggtcgagcaggagggaccaataggctatagatcgccaccagttgaagagcggcgtgatgaaggcattgtatgggctggcagtgggcgtgcgtacggcagctagcaccacatgccgctgcagggggaaggttacaaaggagtcgagggccacggccaggcgagccagacagggcaaaggacatgagcgacggctcgcggccagtgttggccccgtctgtcgtcgggcaaacctagctgagtctgcaggcagcgtgcatcctctcaagcgctcgcccagccctgcagcgcctcgtcgaggggcggacgttgtcatcaaggtcgttaaagagggggcgtgcgaaggaaacaagagtgcgatggaggttgcgagtactggatgcgtttgtggtagtacagaaatgatgaggcagggcagaggacgacgggacggccgacgcccggcctaccactccttctcgcggtcgaaccggtcgagggtcgtcatagcgtcgccgacatccttctgcgccttgacgcgcatgtagaagatcgggcagtccttgctcgagcagaggacgtcctggtggagcgagccctggcagcgctggcactgggtccagagccgggaaaagttgacctggtgctgcgacgtcgtcagcagctgcttctggtagagctcgccgatccgcggccggcagttctggcaaacggcgccgtctgcggtaggagagggggaaacgggtcagctctcatgcagaggcggttgatcggccggcctcgaacggacccttgttggccgtcttaagcggcgtcttgcagccgaggcaggtcacggtccggacggcaaacttcataaggccgccgatcgtcggcgttgcaatgctgatcgtccgcgtgtgctcgcccgcgagaagcgagttggccttgtcgccgaggatcggctcaaagatgcgcatcagcggcttcgacagctggttgtcaaggtagtacttggtgtcgatcggaatgttgttttcgaggacgtagatcgggtcctccgacttatcgtatgcggccgcgcctggaggggggacggtagtatgtcagcaaacggagagcatcgcccgcacccgcggccagacgcacccttgatacccttgatgatgacgtaggcgacccggtcgccgagtgagggcgccgagccggcgtcgcgctggcgcatccggtttgcgagctcgacatgggcctgcttggccgcatagtcggccttagcgagcgccttggtgatgacgagctgcgacatgtcgaccttgttctggaggagctcagatatgacctgcttgacgtacctgaagcgcgaggggtaggttcatcggcggtcagtcgccggtggcatgaggctgggaggccgcccggaacgaactcctcggcgccacggacgtcgcggtcgatcagcatcttgtgcaggcacgtctcgatgaccgtctggacgagccggcagttgtctcgacggacggtctattgcggaatgacgagcatccgggtttgtcagcgagcctgttccggtccagcgactcgtcccgtcggggccacacacctcgatgcccttggtgtccatcttgtcgtacttgtcaggccgtgtccagtagaggccggcgtagcgcttcttattgattaggaggtacggaaagtagaccttctcaaactcgagcttgatcggcttgacaaactttgccgagacgagatcggccgcctcggcgccgagcgacatggcggtctcgagatccgggcagccaaacttgaccatgaccgagtccgtgtcgccgtagatgaccttggcgtcatagtcgtagccgttttcgatgttgtacgagctctcgacctcctggaaggggccaccaaggggagcggcacatcttcagtccggctgcagcgaggagcctcgactcgccaggccggacgtacctgcttcgtaaactcgatcatctctcggccgtaggccgtgaccgaggacgagatggcgaggcacggcagcttgccaaccgtcgcgccagtgaagccgtagaccgagttggccgagacctggagatgcgctggagcggcgtcagcctgcgaacacagccctcgggctccgaggatgtccggttgaccttgagtgccagctgccggccgtcgaggaccgcccgtcggaaggggtccttctcgaccttgagctcggccttggcccgcttacgcgcggcgagcaggtcctcgaggacgatcgccagcaggcccttgcgccgcttcgatgtgacaaagaaatctggcagcggggcgttcacggtcaacgatgagcaagccagcgacaaaaggaagccatcagaggcaggtatcaccgttgttgggcgtgaggatgtaatcctcgtccttgacgagctggagccgctcgatcgtgcccttatcgagcagcgtcgtgtagcagaggttgtgggccatcatgatggacgggtagagcgaggcaaagtcgagcgtcgcgattgggacgtcatagtagccgcgctcgggctcgatgacggtcgcgccctcgtactgctcgtcggagccggccgactggacggccgggacgaggtagccgtcctcgttggctttgcggtagagctgcgagacaaccttgatttgctggccgcgggcgagcaggtagttgaacggcacgccagtgactcgggccatctcggtgtagttgacaaagcacatgagcttgtcaagcagccgctgcggcaagtaggcgtcctgggagggagcgcaacgaggcacagagtcagctcgcgcgttctcgagtgcgtcgaggtcgcgcatagcacgcaccttcaagcagtagacggccagccgccggcgcgactcggatgttccgttctggagctctgtgatgatcgagtagtggacctcctctttctgctcgccgaggaactgggcgcagacggcgttgagcgtataggatcggagcttgtagtcgcgctgcatgaccgtcagcaggtcaagttggagccggccgtcgaggttgatcgtcttggagtcacgtgtgccgtaggccttggacgagaagtgggcgtcctttgcctccgtcttgatgtctggtgggcgggcaggcgacgcggtaggaacaaagtcagtggttggaagcggtgcgagcgcaataagggcagcacgctcgaacgtactgagcagccggccgaggaacgggaagccgacgaccttaagcgccttggcccggtcgagcaggtaaggaaagtcgaagttggtcgtgttgtacccgataatcatgtcggggtcaacctccttgacaaagtcggaccatgcctggagcaaggccgtctccttctgaaactcgaggacctgcgagccgacgatgtgcgcgcacgtattaagcgtaaagacgttgcggatgaacggcttcgactcgcctgcaagagacggcaggttgcaagcggtcagcttcctgatgcgagcgagaggccaagcgcagagggacgcaccctgcctggtgaccatgttggcgatctggatgacaggatccttctcggcctcggggaagatgcccttgcggccggcgcactcgatgtcaaacgagaggatgcggagcggcgccagctttgaccactcgccgtcgggcgcatgcgagatgaggtcgtccgacctgtaaaagtagcaagaggcgacgatcagcgcgcagactccctttgcgctcggacgcttgcgtaaacgtaccggcagtcgagctcgagctgacactggctcgtcttttgtgcgcccggccggatcttgtacttgcccgcggtcagctcgagccaattcatgccggtgatctgaaggcaggacgtgtcagctttggcaggtggatgcctcactgaaagactggccggccgcacctgcttgtcgatcatgaagcgcagctcataggcgatgttgctctcaaaggtcgccgtcggcccgtcaaagaagccgccaaagccaatctcgccccgatcaaagagaccgcgcagcttcgagacaaacttggggtccgagagcgtaatctttagaaacggcgtcaggttgtcaccctggtagccccagagcgatcgcttgagctggacttttgtgtagagaaccgaccggccgctcggcgcaccgatcgcgctctgtatgggtggacgccaggtcagcgctcgctctcgaaagaaggtcacgcaataagcgacccacgttgagcgaattcgagaagtcgcggcagtcgtcgttggtgaagccccgcggggcggcgacgtaaaggtaaggcaggaacgagttgacgtgcagaaggaccgaattgccgctctggtgttcaaaaggcgagagcgattccgtcagcacaagtcaagcatggtagatcgaagagggtggtgccaacaaacctcggtgacgccaaagatgcgcagtcgcgcgccggagccaggctccatgtactcctcgatttcgatctgctgtaaaactgaagtgtgagggacacatgcacggagaggactgtcagcaggagacagcgggaaccgagagcaagtgtgggagcgggcggaccgaggttgtcgcgctgcggatcgagcgccggaggagccggtcgcgcccaggttgccgacgactcggtgatgactgcgaggtggagaggcggcaagcggcacaagaggagcaggacaacgtcagcaattgccactgggcgacactcgcaagcgcagacaacccggagccggggcgagtggacgagcggtgaaagggatggctcgactggccgtagccgcggccctcgaggcagccgtcgcctgagctcgtctgacccgcctgccatgcctcaggccgaaagccctcagcttcccattgactgctcgagagctgtcgcaacgtacctccgccggcgccgctctcacgctgctcctcgagcttccggaggacagcctcgaagccgccctcgttggcggccgccttgcctttgcccttaatgccgccgccacccgactgagttgccttcagtggctgaggcttggccggcatgccgttgctgagcgtcgcatgcggcctgacgtgggcctcggtgttctctgccccgaccggcggagcgaggttgatggcctcgttcggcgggtcggccaggagaggcggcggcgcgtcgtcctggtcgagcttgcgccgtttcgcgaccggtgcggccgaggtcgaggtcgaagcaccggcaaagtcgtcttcgacactctcttcaccatccgacaaagcgtacttggcgggcattcctttgagagatagaggcaggagggtcggtgagggttagagaggacgacgcgccggagatgaagctgctctctctgggcgggcaggtacgcgtcgccttgccgcgcgcgcggtcggctgactaagccaggccgagccaggcacgaaaggccctcctcccttcgtcgtccgccaccccgctcctccaacacctcactctctctcgttccatccaacagaaggtgccaggtcgcacgcgatgagcgacaccaacaagacccggctgctggactcgtttactgcgccaaaagtacgtccccttgacggcctctgtcgggttcacgccggggccgacctcgtctctccgatctctctccgtggacgcaggctgacctcttccatccctctccaccgtcgccgctaggatgtgctcgacgactttgccgacatgaacgagtcggaggacgttgacccgtttgccgagacggccaactcgcgccaggtcgccagtcgcgagagcgagtatcagcgccgaaggttcgaccgaggcgagggcgtccaaggtgcgtcctacctctcagttgccatcagctgccctctagcctagccagcaggctctggaggaggtcttgcaagctgagtctccttgtggaatgaccgcgctgacatctgctcttcctcgcgcatcgcagtcgccgacggcaccaacgacgaaggctcgagctacgcagagacgatgcgcctgcgcaacctcgagcgggatgaggagctcgtcgctcgggctcgggccgaccgcgagcggcaggatgaggaggctgggatcgccaagaagggcgcggtcgccgacgatgcgacgccgccgcgggggagcctcaccgcgggcgaccagacgccgccacggggtgcgcgtgccggaaacgacacgcctcctgccgctggccgcaagggctggggcgaggacggcagttcgacgaccgtcgaggagcagtcgaagccgaagcaagagtttgaggagccgacggcgattccacgcaagcgccggagccggtgggacgagaccccggctggcgtcgatgagacgcccggtggggcgacgatcaagaagtcgcgttgggaccagacgccggtcactggtgtgtcggcctacggtccgaacgcggtcgcgtcgtcgtccaacacgacgtcggcctacggctcgtcggcgaacggcatgccgctcgcctcgctcggctttggcagcagcccggccgaggacccgcgcaaccgctacctgacggacgccgagctcgaccagctccttccggccgagggctatgtcatcattgcccctccgccgggatatactccggcacggacgcacaagtacgacccggtcccggccggcggcttcgtcatgcaggacgagtcggccgctcgggcggcggtcgacgctgctggcggctttgcgcacgacatcccgaccgaaattgagggcatcggtagcctccagttcctcaaggctgaggaccaagagtacttcaagctcgtcctccaggcgacgccggccgaagaggagggcaagctctcggtcgccgagctcaaggagcgcaagattatgcggctcctgctcaagatcaagaatggcacgccgcccgtccgcaaatcggccctccggcagatcaccgacaaggcccgcgactttggcgccggtccgctcttcgacaagattctgccgctgctgatggagcggacactcgaagaccaggagcggcacctgctcgtcaaggtcatcgaccgcgtcctctacaagctcgacgacctcgtccggccctacgtccacaagattctcgtcgtcattgagccgctcctcatcgacgaagactactatgcacgcgtcgagggccgcgagatcatctcgaatctctctaaggcggccggcctcgcccacatgatctctacgatgcggcccgacattgaccacattgacgagtacgttcgcaacacgaccgcacgagcgttttcggtcgtcgcctccgcgctcggcatcccgtcgctcctgccgttcctcaaggccgtctgccggtcaaaaaagtcgtggcaggcccggcacaccggcatccggatcgtccagcagatcgcgatcctgatggggtgcgccgtcctcccgcacctgcgcaacctcgtcgactcgatcgcccacggtctcgaggacgagcagcaaaaagtccggacgatgacggccctcgcgatggcggccctcgccgaggcggccgcgccgtacggtatcgagtcgtttgacaatgtgctcaagccgctctggctcggcatccgccagcaccgcggcaagggcctcgccgcctttctcaaggcgatcggcttcatcatcccgctgatggacccggaatacgcgtcctattacgtcaaggagtgcgttccgatcctcatccgcgagtttgcctcggccgacgaggagatgaagaagattgtcctcaaggtcgtccagcagtgcgcggcgaccgagggcgtcacgccgacgtacgtccgcgaggagatcctgcccgagttcttcaagagcttctgggtccggcggatggccctcgaccggcgcaactaccgctcggtcgtcgagacgacggtcgagctcgcgaccaaggccggcgtgagcgagatcgtgtcccgggtcgtcaacgacctcaaggacgagagcgagccctttcgcaagatggtcatggagacggtcacaaaggtgattgaaaaggtcggcgcggccgacattgacgagcggctcgaggtcctgctcgtcgacggcatcatctacgccttccaggagcagacagtcgaggacaacgtcatgctcgacggtttcggcaccgtcgtcaacgcactcggtatgtggctgcccccgttagagggccttccctcccggcgcgcgcatcatccgctgacttgtcgcacctcttccccgctctcgccaggcatccgcgtcaagccctacctgacccagattgtctcgacgatcctctggcggctcaacaacaagtcagcgaaggtccggcaacaggcagccgacctgacgacccggctcgccgttgtcatcaagcagtgcggcgaggacgcccacctgagcaagctcggcgtcgtcctatttgagcagctcggagaggagtaccccgacactctcggcaggtgcgtcccttgcttccgtcctgccttgctcagcacgtcgccgctgacgactttggccttcattctaatttccagcatcatcgcggccgagacggcgatcgctaacgtcgtcggcatgacacagatgaacccgccggtcaaggacctcctgccgcggatgacgccgatcctgcggaaccggcacgaaaaggtccaggaggcctcgatcaacctgattggccggatcgccgaccgcggtgccgagtttgtgccggcgcgcgagtggatgcggatctgctttgagctcctcgacctactcaaggcgcacaagaaggcgatccgccgggcggccgtcaactcgttcggctacattgcaaaggcgatcggcccgcaggatgtcctcgccgtcctgctgacgaacctccgcgttcaggagcgccagtcgcgcgtctgctcgactgtcgcgatcgccatcgtctccgagacgtgcggcccgttcacgacgatcccagccatcctcaacgagtaccggacgcccgacctcaacgtccgcaacggctgcctaaaggcgctctcgtttgtctttgagtatgtcggcgaaatggccaaggactacatctggtcggtcatgggcatgctcgaggacgccctgacggagcgcgacgccgtccaccggcagacggcggcggcgatcgtcaagcacgtcgcgctcggcaccgcctgcctcggccacgaggaggctcagatgcacctgctcaacctcatctggcccaacattctcgagacgtcgcctcacgtcaaggaccggatcatggaggccatcgagggtctccgtgtcggcctcgggccgggcgtcctgctgagctacctgacgccaggcctcttccatccggcgcgcaaggtccgcgaggtctactggatgatgtacaacacgtgctagtgcgtgcccccttctccctctggcaggttgtgcgcacctcatgctgacgctcttccccttcttccgtagcctcgcgaccgaggacgcgatggtccccttctacccgaatctcggccacctgtctgagaatgacaacgactacacccggcacgcgctctactcgtggctctgagcacctatctctcctaccttcgcctccatgcggttgtatcattatgccagaagtactacagcgccggccgtctgagcgtgcaagccaagacctgcgcctcgcgagactcgtagagtgatcgcgccgccaaccgtcgccgcctctcgcctgcccgggggagaagatgagaggcacgagagacatctactgccggccggcaatcttctgggcaaagccgagcacgcccgacttcttgccagcgaccttgtcggcctgcttctggtcgtgcttgcggcgctcctcggcctcaatctcctcctcgtcgagggcaccccacgagtacctgcgagacgatggaatggcgttagcgacgagtcgaacgagacagtaaagacaaagaatactcaccagacaaccgaaaggacaccgacgagggccgagaggacacagccggccatggcgcccttagcgcgagcggtccagcccgccttgatcgggtaaggaccgaggggctggccgctgaggtcggtcgtcgagaagagaccgacggcgttgccgctcgaggggatgccgagggcctcgcactggctcgtgacaaagccaggcaggcgctggttggcctgcatgagctccggggcgacgatgaaggtggaggcgaggccagacgagagatgccagtcactacaagagcgcgcaagggtcagcgagtcgtcaaagccagcaagtgggagaccgaggaaacgcacatgtggcagtggaagaaccagacgcccgggttgtcggccttgaagcggatcgtggtcgagccgcccgggggaaccataacgacgtcgcgcgagtagacctttgtctggccctcgatcatcggcgggttaatcttggggtcgtccgagagtacgtcaaaggaccggtggacgatctggaagatgtggccgtgcaggtggaacgggtgctggcccgggtcggtgttgttgatcgtgatctgaaccatctggttgtgcttgatgacgatcgcgttcgtctgctcaccgtagacggccgggtcactggcattctcgcccatcgtcatggcggtgatgatggtagggacgatcggtcgctcgtacgtgctgcagggggagtcgaaggtcaggccacggcagaggggcagcgagcaagtggacgcacatctcgttgaaaaaggcgcggttggttccagtgtcccaggtatcgaagccaaagaccatcgggacgtcaatgtcggccggctccatcgtaaagttgaggcgcgggaccatagccatgtcgtcaaagaactcgtattcgtcgatcaggacctcgttgacggtcggcgcggccttgtcgtacgtgacggtagcggtgtagtctgcggcccgggggggggaggaaacacggtcagggatcaaggccagacttcgagcaggaaagctgtcggacgcactcagctggaggtcatccggaactgcgtcaaacatctgggggtcaaagttggcgtggagggcaaagttctgcgagctgtcgctgcgagccttgacgaggaccgagtagcgctgggcgaccgagatggggaagttgtcgaccttgtagggctcgacgtcgacgccgtccgtctcgatgatgtacctgcagggaagagaaaggaagagcagatcagcgaggggcttgagcagcagaggcgggcggctcgacgcaccaatcgtggccctcgagctggagctggaacatggcaaaggcaccggcattgatgaagcggaggcgatacgtcttgccggcctcaaaggggagcgacatctggtctccgacgtcgatccccttggcaatgtcggctgccgggctgccgtactggccgttcttcatccagtacatgatggccgacggcgggacgggctcggcgccggtcgggttatagatgttcataaactggtcgacgagctcgaggtgctgctcgtggtaccactcgctgaccatgatcgtatagtcctcgtcccaggtgatgtcggtccggttgttggcggcgttggggtggatgacgaacggcgtccggagaccgtcggtgtactggcctgtaagcggcaggggaagaagctagttatcagtgagcggcctcgatcgggacgaaaaagaacagcagcagcagcagcacgcaccgaggttatgggcgtggatccagtaggttccgtactgaagcgaggtgtcgatctcgtagtcgtacgtctgaccgggaggaatgccgcactgggtgacgccaacgggtcctgagggagggtgggtaggtcgtgagagtcagtgctcgagcgacaataatgcgagcccgataagagggggccgcaccgtccatgtagttggagccgttaaagtacatgccgtgcgcgtgcagcgacgacggcacgtcgaggccgttgtaggcgtgaatgcggacaatgtcaccctgggtgacctcgaccgggggcggcggcctgcgacaaggggaagtcaggagatcagtcagatcggccggagctcgcgcggaagaggcgggcggacggaccaggtaccattgatgccgacgacgcggcgctcaaactggcggtcagggttggcggtcgcatccgaaatgttcctggttgggtgaggccggatgattaggtcgtgtgcgagcgagaatcggatagcgggatcggaaaaagaggccaggtcgggcggagcggaggaagaatggcggggaagagaggacgcaccaccacatctcgacgatggcggcctgggcggtcgccgcgagcgaggctccggcgaggacgagcgcggacgttcgcatgactgcaggggagtttgcgtggagcagcgaggcggtcggtcaattggacggaagggaaaattgatcggtggccggacgagcaacgaaagaggtcaggtgcgagcgagggacgaggtggcaggagcaaaagacaaggcgtagcgtcagtacaaaggctgtgctcgaggcgcgagagcctttgtgcaggccaactgcagagagaggagacgtacttaggaggggggaagagagtggcgacaggagggggggtgatggttgagagcgaaggaaagcgagaaaggcagaggatgtggaaaaaccgatcagattcgataacttccttgtttggccgcttatttaatttattagtgaaagatctcgatcacattagcctgggtttggtttcgtgcccttctctcagagcaacgaaggtcgacgagggacgggcccttgcaagtcgcaagtagacgggacgctcgtctgtatcgaatcgatgcctttatgtaaccctacgagaaagcgtcgcccttcctcaccatcatctccctaaactgcgcgccggccgactcggacgaaaggcccgctggctgctttggttcgagcgaagttcgagaagcccccaagcccaccggcgcggccgcaaatagcttcgtccctccaggccggtcgtcggacgctcgccgccgaagccgatcgatgcggtcgggcgagcgctcctgcgcggcagccgggctagagcgagccttctccgcggcggggctcggacggagacggcaggctgcggcaggtacggcaggtcccctttgttgtacaggtcggtgggttgtattcttctctcggccgggttgctgcggcgagctcgaagggtcaaaagcctctttcggtcgattcgtatacaggttcattataaggctgcgtctactgcgagttgatgcccgaggacaggcctcggtcttcgatggacgagatggcaccctcgacactcggctggaagttggccgcgccgaggaactcgacgagcccggcccgggtaaagagctcgcgctgggcagtgcgcaggtgagtgaagtagatcgagacgccgcgtgcccgatacgacttggcgagctcggagaagatggcgagcgcactgcaatgcagagccggcacggaggaccggacgtgtcagcgcagagcatggcttcgatcgtgagtagtacgcttgacgtacgatgcgtcgatcgactccatgtcgcccatgtgcatgacaaggacggtcgcctcgtctcgccggggtgcttcactcgggtgggccttgcccggcccgtagagctcgagccgccgaagtctctccttcagctggccggtgttcgctattgaagggaggtccgaggagaggcgtcagcgcgacgaccaattcatgcctgggacggggatctcggccgtaccaaagttgagcgagtcgcgaatccggacgacaagcacgccggggacgtcctcctgcgcgccgggatgttcgtcgagcggaacccagtcgtcatcgacgtggccgaggatctgcaaggtgagcgcctgctgatcagcaagattcgacatcgcgagggattgcagcaggcaagactaacggtaatcctcggctgggttgagtttgagacgaccaggatgagcgaaaagatgaccgatgacaccaggccagtctcgacgccgacaaacagggttagaaggaacgtcaaccaaaactgcgccatgtccttccatgccgagacctgggagaagcgagcgtcagcgggaccagttcaagggaggaaggccaaaggagcgacgcacggcgacgtagaagtggatctcctcgggcgcctcgattaggatgccgtagatgacgaggaggacgatggccgactgcgaccgaaatgcgaccaaaagaagatgcaaaggtgtcagtggtggatcgcaggctggtagacgacagccgttgacgcaccaggacacatttcggcaggaagaagaggctgccgagcaagaagttcatgctgaagacgatgacggccgcggtgacgacgcctgccatgggcgtgcgtgcgccaaattcgccggcgagccggctccgcgtcaggctcccaaagccagagggcaggccgccaaagaccgaggaaacaatgttggccgctcccaaggcgacgagctcccgattcgggctgatcgagtagccgtagcgactggcgttttccttggcggcgacgatcgctaacgaagaagaggggcgagagagacagtcagtattcgcagaggagaggcacgacgtgacgcacagtctacgaagccgataaccgagatgacggccgccgttgggagcgtgatcgagaaccacttgagggtcgacgcccggagagggctagcaatgagagatcgcccgccggacccttcgctgagaccgtcgaccttgccgaggacgagcaacccgcgcttgtcgagctcgaggtagtcggtgaggactagagagcaggttcagctccccgtctgactgctttaggatgcgtaagcaggacgtacgagtggtgatgacaacgccaacgagaatctcgggcacaaacttgagccaggtgaagccgctttttgtctttgtcgcccgcttgaagagcctggccgtcacaaggaaggccagtgtgccgaaggcgacctgatttgggcacggctcagatcagcgcgaggcgacgtcgacatggaaagaggcgaggacaggatactcaccagcatggtgagcttgtgcgcgtcgccgagatggctgacgacgaagcgaaacttggccaccgtcgtcgccgggacatgcgggagcgctttgaggacagggtgcaggccgagcatgccaatcatctggcgtaaggggaaggatgtcgggtcaaccggtgctgcactgactggccgaggtcggaggcgccgcacctgctccacgaagatgacaacgccgacggccgtgatgaagcccttgagtagcgcgcgcgagagcacgacgtcgagaaagccgagccggaacagcccgagcgcgaaggtgatgatgccgacctgcgccgagaagagtggggtcagtccaagcaaagctcacaccggtgttgaataatctcacctggaaggcgagcatggtcgcgacgtcgacagcgacgcggacctgctccgtctcgaggacctcgcggtggcggtggcggtgctcggcgaggacgtcggcccaaatgtcgtcgatcgcattgccgaccagcaggcagagcgctgcctcggcgccgaccgacagctggttgcaggtccctaagacggcgtatatgatcatcggcacgactgcgcaatagagcccggcaatggctggcagaagtggagggaggcggaggacactggtcagccttcgtgcatgtgcctcgaccctgctgcgcgcgagggctcagccgaagcggggaacgcgagcgacgacgcacgggtgaggtgagcgagtgccgaggcatacgagatgccttgagggatcagcaggcaggcgagctgcgaagacaaagaggcgtcgaggggactttgtcagcgtaagcggtcgaagcgcggctggcctctggcagaggggtgctcgacgcacggtgacgcctgcgatcgcgtcgcccgtgaaactgggaaacgagaagtaaagagcggtcggtcagcgacgggtgctatctatgactatcgcagagccgagctacgtacaactcgagcgtgtaggacggcagccaccgggtgattggcacgctggttgtggttcggagggagcgagcgagcgaagtgcggttagcccaagcacccctctccgaagcgcaacccctcgtctcaagcgatggtctggccgggtccacccctgagcctgccgacgccgagttctgagagagacagctctgcaagtcacgtactagtagcgagcccgactcctggcgagccgccagcgtctgctcaaggcggtgccggcgtcgccggagccgccgtcgaccgcgtcctcgtccttggcctcattgtcgtcgtcgtcgtcatcgtcccgagcctcgacgacctcgccaagcgttgtcgggacgatgaactcgctggcgcctggctcgtcgaggtcttcgggcagcgccggcacatcctcacggccggcagcagggcggtcgtgcgacttggtccggccaagcgagcgccgagtcggcgtccgaccgagcgagcgcgagagcgagcggtcaatctgggcgaggagcggcgtccggtcggtcggtggcggcgcaccgcgggagggcgacggcatcgttacaggtgcctggcaaagaagcaggtagtggtgataggtcgagagaagaagggtcgaaggctgaatgaacggcgtggcgtccgattcgcctgtcgccggagctcgccggcccttgggcgcgcgcctgaaccgcggctgaaccagagttgtcttcttctgcccccgccccgcccttactgacacgtccctcagagcaagcaaaacagtcatccaagatcctgcccggcaggtcggcgagccgaacccctgcgtcggcctgcctggcatgcgcacaaggcgcgcccggttgttgtacactgatcgcgccgtgggcgactctctcctggcctcgaaacgtgggacccattagccctccagctgtgcgaggcgacgaagcagaaggtcagccttccgcgcttggacgagccaagcagcgtatcaagggacgtacgcggatcacaatataggcgatgccgagggcaaggacaagcatgacgagcagcaggccggcaatgatgctgcccatgatgagccagtcgagcccgccggcgtcgatcggctcgtcgtacctcttgtacggcaggcccttcctcgcccgcgtggcgtccatgatgcgctggttgcgcttgagcttcttcgcggcgtcagcctccttcttggcgacggcgatccggatccgggcgtcgagcgtcgactcgtcgaggcccgacgaggcctggccggcagggccctcggacggcgcctggacgctgatgaaggacgggtagtagtgctcggtccattgctcaatctgcaagcaggcgggtagggacagaggctatcagtggcgagcctcgctgctcaaaacacgcgctcgcgaacgcaccttgccgcaggtgatggagatcttgatgaagttcgggtctttgggcgttgacttggcgtgaatcttgcgggcgtactcgaggaacatgtaggcgacgtcgcgcgggttggtcgccttcatgataagctggaagggtaagggcatgagagcatcagcagtgggcccgagccgcaagcttctaaggtccagctcgcacctggacggcctggcccttgcgaatcttgcagttctgcttgaggacgagcgggttgttgtagcagtgctcgagcgtcgcgagcgccatgacggccgggatcgagcagaagttgaagatgctctggttccggaggagcgaaaggtagtcgagcgagtcggtcgcgtggctgagggcgtcgacaatcatcgcgttgaggacccagaggccctgctcggcgttcttgggcgcgacaacgtcggtcagctccttgaacgggagcatgcccggcttggtgcagaactcgtccgaggcaaagacggagcgcggccagaagccccggccggcgtcgacgtcctccttgatgtcgcgcaggatgtttgtcttctggaggaggagacccatcgagttggacaggacgagctgcttggccaggaacggccgctccttctcagtcgagacaaacagccgcgagagaccctcgccgaccagaccggcgacgtagctgagggacgcaagtcgaaggaggtcagcagaagcggcggcggcaggatgccttcacagtctctggcgggagtctcgacgcactggcagtagaggttgaactcctccatgttggttacctcggcgacgggccgagcctcagtcgcgagcgcgcagaagtcggccataccggcgcccatcttgcgcgtgatgtcgacaatgacttcgcggtcgctgaatgaaacaacgagactatcgtcagtccagctgcctgtcttagtcgagccagccagaagccgggcggacgcacgcaggtgcaaggtggcccatctcagtgacgacacagtcaaagttgacgagcagcggcttgtccttctccttgtccgagttgccgtcaaaggtgaagccgggggtgacgagcttctcgtggaaggaccggagcagaggcagcttgactgagttggggatcgtcatgtcgtcctcgaccgtgtcgagcccgcggagggcgaggtagaagaggcagatctggaggcgcaaagagggcgggcgggctcgtcagtcctggctccgaggcatgtgagctggttccgccaatgagcgagacgtacgacacgggcgaggtctccgtcgagctccttgatgaccgccgcaaacgagcgcgacgtcaggtcgaggaaggcccagcagtcgcgcatcgactggcggtcccagcccgacgtctcgtgctccgtcgtcgcggtaatgttgcgccgcggctcatgccagatcgagtactgcaacagcgaccggagctcgtcctgtgggtggggcaggattgtgtgaaagggacgagggagctgtcagccttcgttcgaggaggccgcgcgtcgccttgtcgagaccccggacaacgcacgggatgcgtgacagctgcgatgccgacggttcagaggggacaggagggtcagccaacaggctctggaaagccagcgccctttgatcactccagaagacgaggccggagacaggtcgtcgaccggcgacgaggtgggacgatctcgtcgcgtccggcccaggcggcggccggcgaggcagcgggagcaagacgacgcacccagcttgaggtactctgcgactcccatgtttgcaagagctgctaaggagaaggaagaggggagaagagaggagggcgggcgagacgggtgacggcggagagagagggcggtgagaggtacgagagagagggagagagaggcttcagcccgggaacgaggagaaggcggcccgcgcaaacgggcgacgcggggcgaagcggcggcgcctcggagggagcgctcgaggacttccctcctcacgcacagagtgcccggctgacgggatcgttctgatcgccaggccagagcattcgattgagcaaggcctatgtagcaagagcgacgcactcaagcctctgggaggctgtcaatgagggagctgcctgcaggtcgccgctgctaggcgacgcgcagcagaagtcagcctgctgaacgagggaccgcggccctcacgtcacgttgaccggacgaaggaggattcagagatggcgtcgtccctccgcaaccctcgtctcgcatctatgatcggggcgtacgagagcacgacatgagaaggcacgaggccatgcggaccgcaggcccttcttgttaaagcggggtcgcaagccaaacgcgcagaggtcgagacatccatcgatgctctctcgacaggatcgccgagcgccaggcctttcggcagtgagagcgaagcatcgcactctccatgtgatcctgaaggagctgcgtgcaggcagtggcctaaggacagcgcatcttctgcgatggacgtggcgggcagattctccgtgacgcctcgacttctggcgtccgtgcgacacactgccgcgggaaggaatgaggtatcagcaatgtccgactgtgccgagcgctcattgcccttttgtgcaagtctctgcccggggtcactgagggcagccagagagcgatgctgctcgacgggcaggagtccccgcggtcgcctgtctcaggcgagctgggtcaggtcagcatgcaacccagctctctctctctctggtcaggtatgcgacgaggtcagcacgtcgagtgtccgtccagcaggaggcgtccctgtctgctgcagggagggtgcatgggtgtgatagtcgagggaggggctgagctcgatcgctcgtattcgtccctgcaccagcccgcgcgtcctcagcctccttcgaccttccctcttgggccaactggagtcgcacaacagagcaagccatcacctccacgcctcccccttaccccacgccacgatcatccaagcggcccagaagccccttttcagaagagagagcacagctcgtacgttcttgtcgcgcctccgcctcgctgcccagcccgtcagctcggctcggtctcacgcatccctccgtcctgcccatcccgtgcggccggggtgagctgagacggaccgtcccctcgagccggatgctaacctgcttcccttgcccgacctcgtgcccgccctctccgcagctagtaacaaggccatctaactgctccctcgtcgcaggatcgcaagccggcagcctcgtcttctctcaacaacggcccgagcctccgttgtcaacgggtcggggcgggcagcggagttgagttgatttcgaggggcgtgcgagcgtcgtgtcggaagggagacagtgtgagagaggtgggaggggaggtccggaaggatgccgcgaggtgagcggcgaagccttttactgccaggtctggcggtagccctgctgctgggcgtagaacgaggcgtaggggtcgccgccctgctgctggtaggcctgctgctgctgctgggcctgctggggctgctgctgctgaccggcagcctgctgagccggataggccgaccgggcgccggccgagccgtaggcggtctgcgagtagcgctgagcgccctgctgaccaccggccgtctggccagcctgcgcaccggcggtggccgaagacgtcttgccgtcggcctgttggccggcgtagcccttgaacgactgctcgggcgaggcctggccggtccgggccgcgccgctgacggccgactgctgcggggcaggcgagccgccgaggaacgagtggatgcctcccgcaccagcgccagcggcgtaggcgttctggccggcggcgttgccgatcggcgagccgccgtacgagacgggctcgtcgtagccagccgacgagaagtggccgtagggcgactgagcctgctgagccttgacgttgggcgacgcgagcgaggcggccgaggccccgagcggggcggccgccggggcgggacccgaaggaggctgggcgtaggctggccggccccactgctgctgctgccaagcagcggggttctggtagtagtaggctaaagagttggaaagacgaagggggcaggctgtcagcgcgtacggcgcaagggcgactggcggcaagaggggacggacggttgctgttggcccagtacgggttgtaagggggcatcccgccgtagtagccggcggcggccggctgctggccggcgtggacgggcggctgggggccgctttgctgctgctgcgagcccgcctgctgctgctggccgccagacgcctgctgggcgacgggagccttggccgcgtcgggctcgacggccgcgcgctgcgagaaggccgagtaggggtcgtagaacgactgctgctgctgcgaccgatcgatcgcgccgtagccctcgaagccgccgttgtagccgccgttgccggcgccgaggccgaaggcgccaccgtgctgctgcgaggcaccgtactgggcctgctggtggccgtgctgctcctgctgggcgtgttgctgctgctgctggggagtctgctgctgagcctgctgctgctgctgcgactgctggccgtagtagggcgactggttcgagtcctggcggtagtatgagccggcctgggggtgctgaagctggggaggagcctgctgctgctcctgctggtgggcctggtaagggctgtaggcggcgggctgggcggcggcaacggcgggcgaggccgcggcggcctggtggaagaagttagagagaccctggggggcggcggccggggtggcctgctgctgctgctgctgctgggcgacctggggctcctgggcggcgaccgaggccggagcagactcctgggcggcaggggcctcgtacgactgctcagcggaactgtatggtagagcagagggggtgtcaaaacaaaaggagcggcattgagggccatggcaaaaggacggggacgcacgctgacggctgctcgtaaatttggccctcgccgtcaaggctgaggctgccgaactgcatgccgaccttgccgacgccgctgccgacaccgccgggcatgacgacggcctcgtcgccgtgcgaccggaaccggttggcctggctcttggccggctgcttcttctgctgctgctgcgggagggcggccggggcagccgacggctcctcgagaccagggggcggcgcggacgtcgtgggcgcagcggcagcgggtgcggcggcggccggggcgggcgcggcggcctccggagttgactcagactcagcggcagggctaacggacgacgaggactcctcagtcgaagcggccttgctgtcggacgacgacgccggcgcagacgactcggccgcggcagggacagtctcgacctcctccttgatctcgtcgacgaccttctcaatcgagccggtcacctccttcggggccgctccgccccacgcggcatcgccgctcgccttggggcccgaggacgtaacggcctcatccgagagcgaagggccgtcccactgcttgccggcgttcgaggacgcagcaggcgccttcagggcggccttgggcgccgctggtgcgggtgcaggcttcggcttctccacaggcctggcggagagcggggagtcagtcatgcaacgagtcccgactcaaaaagaacgagacaaagacgcacttggcaatctgagcccagctcattgtcgatcccttggggacgatccggccgctgacgcccttgcccttctgcgcggccgtcagtgccggcgcgccgttcgatgcaggctccttcttggtctcctcgggcttcttagacgacgaagactgttccttcgactcggccgccggtgcagacaacgacgacgacgcggcctcagccggggcagcgaccgaagcggccgactcagccgccgtcggctcgtcgctccactttccgccctcggcgccgccggcagtcgcatcctccgtcgtcgccggtgcgggcgtcgactcggccttctcctcggtcgccgccggcgagccgttcgactgccggccaccagggccacccagaccgggctgcatgaagccgccgcgaccgccgcggaagccaccgcgaccagcgaagcctacgcgaccgcggaagcccatgccttccgctgggaaaaggatgcaggaggggcgaaaaggctgtcagcagacgacttggcggaacgagcagctcgaagaaactgaggacgcacgtccgccgcggccacgaccgccccggaaacctccccggccggcaaattggccactttgctgctgctgctgctggttgaaggccggcgacgaggacgaagccttggcggccggtgccgctgaaggcgtcggcttgggcttgcgcgtctgggtcgtgaactgggaagccttgcctgcggggacaaaagaagaaggaaagactcaggccagctctcagctattgagtggaggtcggtcgccgggcagattcgagcgagggataggtatgaagggataagtccgccaaacgtgagaaggaaagccttcatgcggccttccctgctcgcggcctgcatgcgcaagagcaaggcggccagaaggctgcccgacgataagcagcctcggtaacgaggcgacgtctcatgcccctcgaggcagatcgcctggcaacagcacgagcgactgctctcgagagggactgctctgagcccggtcgtgtgcctcccctccgcccgcgcgcgcccgaccccggaaccgactagtcgtcctgccgctgaacgccctctcgagcgctcaaaggcagcagacgtggtcccgggtgctatgaggccccaggtagggtttgagcgaggtaggcggtcgcctcctggccctcgcttgcgcgagcacaagatgcaaaggcgagctcgagcgctcggccgggcgcttcgagatggccctcatgctccttcgcctcccagctgagcctcgccgagtcacgatcgcttaggcgaccacacggttgagtggctggagcagcgtgaactttgggccgagcacaggaacgaggagattggagtccgatcggagtagggggagagcaagagacgcaccgtcggtgatggagttgacggcgacgtcgagcgcgccctttgagtcgtcgaggacgagcaggaggtcgtcctcggcccagtcggggaagatggccgagagcgtcgggagcgagtcgccgtactttgcccgaagcgggtggagggaggacatggcgtgggggacaggagttgatggagagagagagaggtggttggaatggggtcagagggggactttttcctttcgcctctgcctcgcctcgagccgaaggagggaccgacggcgccgcgcgcgaggcggcgcggccagacggcgaatccgtctcgcaggttcgggcccaatgtaataacacaggtcccggccctaccgcgagcccgccagcccggctcgcctgctcgcatcttgccctgacgctcgctgcccagcccagtcgagctcccttcagccctccgtctctgcccagcatggctcagccagcgccggctccgcgccagcgttacctcgaccagctctcgacctcgctcttccactgtcggtcgcttgtcctctggaaccgaggcgcggcgcgaccaagagctgaccaccacctctccctcgcctgccggcagtcattctcccgctcctgccgacgcccgaggagctgaacaccaagcagcaggtccgcgtcctgatcgagaagctcatacgcaccgtcgagccaaagtcccgtctgctcgcgttcgggtcaactgtccgtccccttctcctgcgcgcgtgtgcgcccccggcaccgaagctcgtccgccggctgacccctttgcacatgaccccttgcgaccggcatcttcaggccaatggtttctcgttacgcaacagcggtccgtcttgcgacgcttgctcgtctgccttttactgctagacgattcctgacgccttgtgctcttcttgtcgacctcgcatgcatcccttcggtttctcactttttcccgggcttcgcagacatggacctctgcgtcctgcttgacccgagctcgacaccgctcccggcgagcgagcttgttacgctgattggaaacctgctcgagcgaggtaagtcctgcgttctttgccacgactccttggccggctcgatccgtctttcagaggcggagctcgacctcagtcgcagcgcgcgagcgcgcagacgctcaactccgacccctcctctcacccttcggccatgactgacgtcctcgcttgcccatcctctgaacgatatcgccctgtgctaccgcacgccctactcctcattgaccgccctcgccggccgcccttccactggcttcctcgacccctcatctcctaaaatctgtccttcctccctgtcacctggcctctctcgcgcggacggcggcctcacagagaccaactttgccgtcaagtcgctccccaaggcctacgtgccgatcatcaagctctcgctcctcccctcgcccggcctgccattcgggatcgcgtgcgacatcggatttgagaaccggctcgcactcgagaacacccggctgctcctgacgtatgcgacggtcgacccagcccgggtccggacgatggtcttgtttgtcaaggtctggagcaaacggcggcggatcaacagcccctaccgcgggacgctctcgtgcgtcaagttccagcctgtctcgctcgaggcgcagttagctggggacgactctcgaggctgatactacgatccgctcgccacaggtcgtacggctacacgctcctcgtcctcttcttccttatccacgtgcaacagccgtcggttctgcccaatctgcaggcgatcccgcccccgccccggtcgagcgcgacctcgcccttggcagcggcggccgtgccccgtggcggagccgggccggcgccggcgagccatccggccctgcccgagcacgaggtcaatggctgggacgtctggttctttgacgacacggagctcctccggcgcgagtgggcgagcggcaacgtccagtcggtcggcgagctgtgcggcctccttgtcgatcgcgtcctctatcgcccgacgtgtgctgactgctcatcatctcccttccacaggttgatcgactttttccgcttctactgccagtcgtttgcctttaacaccgacgttgtctcgatccgggccggcctcgttacgaaagagtcgaaaaattggacgaccgactcggacgtcggcggcatgaacgagatgagccgcgagcgcaatcggctgtgcatcgaggacccgttcgagcggtcatacgtgcgtctctctctcgcttgcacaggttgggtgaccaacaaggctgacgtattcactcttctggcttgccacctcagaacgtcgcccggactgtcaccaaggacggcctcttcacgattcggggcgagttcatgcgggcgacgcggatcctgacgacccggccagagcgggcggtcgcggctctcgcccagctctgcgaggagcgcgacgaggagctcatgcatgccccgcgctcgcgctcgccgaggccaggcggaggccgaacgccttatcccggcggcggcggcggcttccggggcggatattcgcccccgaagaaccactattcgctcccgacgagctcgagctcgctgcacggtgggggcggagggatcggcggcggcggagtcggacatggcgtcggtggcggagggcctgtgaacggccccggcggcgcggcccagctaccgcacccgacttcgaccgacgccaacgccaacctgcatcgttcacagtcgcactctggctcatcgcgtgtgccgtatcctgccgggcccggcgccgcagggagtgccgtcccgagctcgagccagagcccgcaccaccttccggcccacgcaccctcgggcatctcgcctctcgtcccgacgacccggacgccgatgttcagcccgctcggctcgcccgccggcagcccccgcgcacgcgcgaccatgcttgccggaccgaacgtcagcgggctcgacctcgacggcggcttgtcaggctcggccgggacgtcgccagtcctcgctcacagtcacagcgcccagcaccatgcgacattctatacgccgctgaacgacgcggcggccggtctcgtcgaccagcagcagcatcagtcgtttgcggagccgccgagccgaggccggcaggatgcctcgtcctacggcgccggttcgtatggtctcgatgcgtacggcggcggcgccggctttgacagccgaggaccgagccagggctcgcgaggccggacgggcgggcgcgtccaggatctccggggcatgcccaactcgcgaccctcggccggacccaacggcgcatgcagcaacggcccggtagcctcgtcgtcgccgacgggagcggccagctcgagctcgcccggcctcggtagcgcagccacggcaccggcgccgcagaacctctcgctgctcggcgggagccatctctcgcccggtgcggttggcggcctgccgttctcgtcgtcgaacacgtccagcagcagccggcgagccgtctcgacgccgccgccgggctcggcctttggcgtcgccccgctctacaacgaccggctgtttgtcggcggcgcctttgatggcggagcctttgccgagggacttcctcagcagcagcaacaacaaggtggcggcatgcggcctgccgtcgccgccggaggaccgctcgcctcaggctcgaccgcgccatcgtcgatgcacccgacgccgaccggcacgggctacacgagtcctcatcacggcgtcaatctgccggcacggccgcacctcctctcggcctcgacgtcgtcgtcgcactcgctctcgacagctggcggccagtcggcagcggcaggctcacccggcgtcggcggaccaccgacgaatggtggctttgcggccgccctcgcgacgtcggacctcgacgacggcgcgccctcgttcctctcgccctcgctcctcctctcgcccgagcagaccaaggtcaagcagctcgtgcccgtcaccgagccgccgctgtttgcgctcgcctcgggcgctcacgccggagcagtcggcgacgccccgccgtctgtcttcccacggtacccgcacccgcccgggacgcgcacgcgcgagtcgagcaggagtcgcgaccgaacgagggacagctcgcctctcgcgcgcgaccggctgagcccgctcaagggctccgttttggaggaagacggcatccatgccgcgatgagcaggcttgggctcgaggaccgccagcggagggcagcggcagcggccgcagccgcaacaagcggcggcgcggccgttgaggccgaggacaaccggcgatgaggggccagcgctttgcctcattccacagcacctactcctgctcttcgccccggacccaatcggtccgtcggccgactctatcgcatgagccgcccccgcaaacagctgtcggttgtgtgagcgtacgcgttcgtctcgcgctgtcggctctgcgcgggcgagttgccgacggctgctgtcgtcccctgcgcttgccttctctcctcagcctaagcccccctgcatcactctcctgcactctggtcgccttcttatcgcggccttgcaagcctcaccgtcttgcaagggggaggaggacatgccgcgattacaagggcaggcgcggcgtcctaagctttaggccgggggcgacgaaacctcaagaacacagacgctcaagtccgaccggtcgcccttttccccccctctttctctctctctctctctctctatcaacccctctccgacgcctacagctcagcacgccctagagctcctctcctcagacctcgtttacacatcctccagcctgaagttctgcccgccatgaccgtcacgctcgagctcccgcactctatcgacctcgatcgtgagcctcctcctcgtcatggctctcagccctcgcgcgctcgagcccttcagccctcctctccttccggctaagagcaccttagctgacaccggctcatttctcgcaactcgcagaccacctctcggacgatgtccgggcaaggacgccgtcggccatgaaggcgatgggccgtctgctcggcgacacgtcgatcgtctcgctcgcaggcggcatgccgcacgcgtccctcttcccgatgagtcaggcgaccttcacggttcctcacccgcggacgctcggtgacgtcgccggctggacgtcgggcgagggcgagacgctcgaggtcaacctctacaagaaccgcaaaggtggcgcgatcgacctcgcaaagggcctccagtatggcctctcgaacggtgagcacgccgactcgcaccctcctcccactctgtcgccggcctcggccgagcccgctcgccatggcaccatctgatcacttagctcctctcaggcttcgaggagcttatccggcctctccacgagatgacccaaatggtccacaagccgccttacagcgacacggcgacggtcctcaccctcggctgcactggtgcgacgacctccctcagccttccgccagagagtgccgccgctgaccttctcgacgtctctcgcgctttcgcagacggcgtcgccaagacgtggacgctcttttgcgagaagggcgacaatgtcctctgcgaggagttctcgttctcggcctcgctcaactctggccgcgcgcggggcatcacgttccacggcgtcaaggtcgacggcgagggcatggaccccgaggagctcgaccgtgtcatgagcacctgggacgtcgagacgcagggcaagaagccgcacctgctctacacgatcccttgtgcgtctcgctgcagccgggctgcttcgtttgtaacaggcgctgactctgcatcccctctcactctgcaggcggccaaaatccgaccggcaccgtcctttctgaggcccgctacggccaaatctacaccgtctgccagaagcacgacctgatcatcatggaggacgagtgcgacataccggcttcttgcgcgaggctctgtaccgaggctaactgtccaccgtcccccttcctggcagcccctacttttggctgcagttccagcattacacgcccaacctcgctgaccggacagccggccacgccaagtaccctctgccgccgccgaccggcaacccggccgacgacgacatcgaagccatcctcaagcccttcaatgagtacgccggcgtcaagtcgttcctgagccgggacatcgacggccgagtggtccggcttgacaccttttccaaattcttcgccccgggatcgcgttgcgtcagtccttgtcgacaggggaggtcgacctgggctttaagctgacgctctctcgctttctcgcagggctgggtcacgagcaactcgtcctttgccgagcgctttctccgcgtcggcgagaccaacacgcagacgccaaacggcctcggccagtcggtcctcgcctcgtactttgacccgaccgtcggctggggcatgggcggcatgctccggtggatctggtcggtccggcgcgagtacgagcgcaagcgcgacttcttctgcgacaacctgtgcgtgctctctcgtcatcctgcacgcctgcccgtgtgctgatcaactaccatcgtttgatatctcagcgccaaattttgcgacgagcgctacgcccggaccgtccccgcccggggcggcatgttccagtgggtcgagatcaacctcgagaaccatccgcgcttcaagcggatcatgccggcgccggccgtcggaccggcgaccaacacggtcacgctcatccaggagctctttgactactttctcaagaaccggctgctgatcctcccggcggccatgtttgcgacttacgtcgagggcacgccaaacgggcccgagggcaacatccacgaccgctgccagtacttccgggcgacgtacgccggcgagacgagccaaattgaggtcgcgtgcgtgccttctttgcgtcgtctcgatgctcgatccactcgctgacgccgtccttctcgaccctgtgcaggctcgagatctttggccgctgcctcgaagagtggttcgcatcgggcgacccaaacgacagcgccatcgccaactagcgagggagcccgcccctttgccactcccttcacgccgttacttcttcctgggtttccatctgccaccaatcgtccttgttgtcctagacgctctttttgtattccctcccctcccccgggatgggttgggttcggttgcttgcttgcgagtggccagataaggatgtcgcagccccgggggaatgggggagaacggccgagaggggccgacgacaaggcctgtacacgatgtgaaggagggatgacggcgggcggggcatgtcgaataggcggagtggggtcattctgcaggggaaggcgactctcacttgtttgtcagtcgcggttcgtccgacgccagcgaaaggggagacgcacagaggacattgagcgtggcgggcttgagaggcggtgctcgggcacacgacgctggcaagagaggccaaagcggcgaccgagcgggtgcaaaggcggacaccatctctcggtcaagtctcagctcagctgaggcttgcgaaggttgccgtcctcgtcgtagaggtcacgattccggcccatgcccccgccatcggcaatcatctcctcgacatggacacccgttcggctgacgagttgcgccgtcggcgtctcggtccgctcgaccttgagacccgtcccgaccgccccgccgttcgcagcggcggcaccggcgcgggcagcagtaaactcggacgtcgtcggcgtcgcaacgggcagggtcgaagccgtcgcagcggaggtcgtctgcgtcgtgcttgtggtcgccggcccggtcgaagcgtggtagtacgtctgtcgcggctgccgcttgtagtcgtagacgtggaagctgtagggggggagggtggagcagacacgcgtcagtcgaggagaaagagaggcacttcgtccggacgacgagggaggacgcactgctcctccatcatgcgcatgtcggtgctcatgagcgcaacgtcctgatttggcttgcgcttccgggccttgagcgggttctcctcgagcaggagctcctcgagctcgtgcgtcgcgtcaaagtttgcctttttcgagtcgggcacaaatagcggctggccgcgcttagcgagcatcgtcggccagtcaaagccagagagccaaggcgtccgcttgacgtcttcgagcccgcctccgccggcccgccagccaagccgccgctgcggatcgcgctcgagtagctgtagcgaggatagggcgacgactcgtcagcaaggagggcgaggcgggtcagaggccagagcggggagactcacgccggcgatgaacgccttgccgtcggccgagcatttcgcgtcgccgtcctcgggccagcagagccggtcgccggcaatgctctcggtcagcgcgctgttggtctttccgcggaacggccggcggccaaagaggagctcgtaaaggacgacgccgagactccaccagtcgatctggcacgagtagcctcgccggttgaggacctcaggcgccatgtaggccatcgagccggcgatgcccgtcagctgccggcctgagggcgcgaaatggacggcaatgttgaagtcggtcaggtggacgtggccgcgctcgtcgagcaggacattgtcgggcttgaggtcgcggtggacgatccggatcgagtgcagatagtcgagcgccgacgccagctcgaccatcatgaaccgaaccgcgttctcctcaatgccgccgagccggtcgaggtggactagagtcaagggtcggggaggagacctcagcgaatgcgagcggcggcgcacaagagagggcgacgcacagcggaggtcaccgccgagcatcaggtcgaggacaaagaagcagtgctcgtcgtcctggaaggcgtagcgcagattgacgacaaacgggtggtcgatctaaacgacgcagcaaagcaggtggttcagcttgcggccccttcggacgggagagcaggagaaaacgagcgcacctcctcgagcagccgccgctcctggatgatgtttgcgacggccttcatcttgcagcacttggccttgttgatgtacttgagcgcgagcagctgcttggtctgcttgtgctggacgacgcggacctggcgggacgagagggcgagtgagcgagtctgctggtcagcatcgtcttgactcagactttgtccatgacggccatcccgtttgagcaaggcagcgctgcgaccatcgccgcccgcgacagagccagctgccctcaagccgcggtcgcctcctgagtcgcctttagacagccagcggcggccactctgagctctttgacgagcacgcgacccgttgacaaccaagcgcgacatcccgctgcgtgacggtcgggcccagagccgacggcgacggcgagcagcgtaggctttgtgcccgccatcccttcgtccaagcggccggacaaaacggcgcgttcgcgccggcggaaccagtgaggcacagaaggaggagcgcaagactgaccttgccgaaggcgccctttccgacggaccggaggaggtagaagtggaagaggttggcctcgccgtcatagtcgatcgcctggaaaggaggtgagcgaccgaccgaccgagtgggcaggcgagggcgagcacgagcaggcacggttattcgaggaagggggcgcgaggatcggtttggacgagggtttcgaggaacgaggagattaaggtcgaggatagatgtacagcagggcatcggtgccgagcggatgggacgcggcggttggaggtccgaagggtaaggtgatggcacgcaaagtcgcgaaatagggagaggcgcgggtggagcgacgggtcgggcgtataccggcgagcaaggacgatgatggacgtgacgtcggatgtcatcgaggcaggacagcaaatggaaagggagggcgagcggcgaacgtcagtcgtctggccgtcgctgttggtcgagctcgtccccctcccctcttcccttccgtctcctccggccggcctggctcgccggaagtcttcaccgcaccagagccgcctgtcaggaccgactcgactgctcgcacacctccagagcatccttctctgctctagctggtcgccagtgcgagcaggacgatcgggagcgaacgacgctgccttgctcgctcgctcgccatgaggggggggggggacgctcgggccgatcccggcgggctcgagacagggcagtacggacctctggcttgcaacaggatgcgcccattgcggcctcttcccggagtccggttggctactggcgggttgctgggcgtgacctgtcttatgccctggcgtcaggaagaaggggagacggggtgaaggtgaagggcgagggaaggttgggctgaagtcgctcactcggagggccgacaggaggcgcgcgcgcgctggccgcgtgggctcgaccgcccgaagcaagtcgagacatggcaaaagggccttcgaccaaacagacgacgacgacgacaacctcgtcagccccgcacggtgcagcgctctctcgttcgtggcaccgtcttggtagaggctgcgagagaagcgtcgcctctgtcgagaaattgaggcctgctgtctgcccgagcggccgtcgctccgtcctcccggcctggccctgctgcgccgcgagctcgctcttgtgtgcctttgcctgcctgcttgcctgcctgcctgcctggccgaatcagaggccgtcggtcgccctgcccctgctcctcgggcacggaaacgggtacgagtgttgatgctgctcgactggtcatgactgcctacgagggaacgactctctcgagcatgaaagggaggcgcctcctgctgccgccttctgcttggtccccctcctctgccgctcgacccgagcgagacccgacgccgaccgaaagtctccgtcagagctcgtcgtcgtgactcacggaacatcagcagtagcaagtacaagagccagcacggtacgtcccctctgttatctgcaagcggcctgcaacggcagtgttgcaagctgctggctctgcgcgaggcagacctctcgatcgctctcgtctcgcctttcgccgcaactttcgtccccgctgacccggtcgacccgacccgtccccgcaaacggccaccatcgcctctgttcgtcccaggcacgccagcaccgaaccactccagcctccctctcacgtaccacacaaagaggcaccccatcgcgagcttgagctctcgccttgcacgcacccctccttccgagcgcgctcgcctgctttccctaccggtcccgagctcgctcctgccgccggctctggctcgtcgcagccgctgcatcacctgcttcgccgctgcaacctcggctcgagcagcagaagcacctgccgctcacgtcatcggagcacctgtcacagccgagctcgaaccagaagttattccgccgcagccgccggcagcgaccagcatcagcagcggcagtcagcggcaccagcgcccgctcttcccttgccggctcactccgccgtgagcaacagcctccgcacccctcctccctctctccgcctccctccctcaccagacgaccttaccggatctccctgataccgcagtaataggaatctgacggcgccatgtcagaatcgccctcggctatccgcgtccactcggaggacggccacggcggcggaggtcatggagccgacgggatggacgccagcgcccgcgccaagacgctcaaccggacgagcagggcgtgcaacaactgccgaaagcagaaggtgcgcaggctctcttcctcctcttgctgggctgttgctccttgcctatcctctcgctcggaggggcttcacaagcgcggctcgcgaggtgtcgagcgacgccgtgctcgtcggctcgcatgcctctccaagcaactcgggctcactcctaagttcctcctgcagatgcgttgcatcggtgccgaagacccgccctgcaagcgctgccggacgggaggcctcgactgcctctttgaaaagcccgcgcgcgaaggcacgcaggttggcgaggagcgcatccggatgctcgagacgcaggttggctcgatccagagcacactggccgagctcgtcagcacgctcaaggcggccaactcggccaatggcatcggcagcagcgggaacggcgggagggaagtcggcggcggagcgtcttcgtcctcggctcggtcgaatgggcgctctcaacagcagcaacaacagcaggcacagcgtcagcagcgcgtgccgcaacaacagtcacagcagcagcagcggagggaggactatgcctcaccgaccatctacaacgatgccgccgacccgctgcccaacatggcccactacgagggctcgctcatgagcattatcagccctgccggctcgggcgaccaccagtatgccggcccctcttcggccgtgccgatggctacgcaaagcaccctgccccccgcctaccgcccgtacccttacggtggcagcgcaggaggcccctccacctcatcgacggcggctggagcctatattctcccgcagctccacggcggcggcggctcgtcgaggaccgtgccgctctcgatccccgacaaccacccctacccgctccctccaccgatcccgacgtcccgtcacggcacccgctcctcgatatctcacgtcgtcaacggcagcggcggggccttgccgccgatggcctcgtcagctgctctgcctggcggtgtcctcgccggccgacagctcccgacgaatccttcgtctgcctcgggcagcgcctacgccaacctcctcagccaagcgctctacccgctccggcagacgcaccacgtcggcccggccacctcgtcggctcggacgacgcctgccggctcagaggccgacgagagcgaccttctccagcgggaggagctcgagttcccaacgcggtcggccctcgagccgctcggtgcgatgggccgactggcgcaggcggctctgctcgagaaggacggtccggcggcggcgacaactggggcagcaggtgttgggggaactctccttggcggtcagcagtcggccggagaagcgagtgtcgatgagccctcgtcgacagaagccggccggcggagttccctcggcgggaagaaggagacgacgacgacgaccggcaccggcggtaagggcgggctcgacggcctcctcctcctcgccgagggcgccaagcactcgccaaaggccgaccagtcgggctcggctggaccctcgaccgctgccaactcgccctcggcctcgggcccgcatgccgagtcgtcgacgagtgccggcgggattgcaccccacgctgccgaaggccctccgcgtcggcctgggaagcgcgctcgattcgccgaggacgacagcgaggccgacgacagcgagaacgccggcggccagagcggcggctttcggaaatccagcagcagcaggagcggcgtcgacggtagccggcgactattgagcgccggcaccggcctgcgcgagagccacatcctcggcgggccagggatggcaggcggcgatggcgggccacccatcggcaaggacggccggatcctcgactgcatcaacgccggcatcgtcagcctcgaggagggtcgcgagctgttcgacatgtgcgtctcccttggatcaccgttgaagcgagcaggaagagctgacctgctgatgctctttcagctactggaagggcgccttccgcttcctgccaatctacgagcccggccgcgacaattttgaagagtgcgtccagctctgcccttgctgccaggcgctgcttctgacgtcaacccccttccagactccgccggcggtcgcctttcagcgtcggggccatgtgctttgtcggcgcacgagttcgcgacggtggcgggccaaagtcggaggcccagatcgggctctggtatcacgtccggcgcatctcgcaagagacgctgttcaagacgacgacgcgcgtcgaggccatccaggcgacgatcctcgtcactggctggaacgagtatggctggctgctcggcggccatgcggtccggctcgcgtttgagctcggctgccacacggccttcctccggctcgcgaggtcgggcatgggcgccggccggtcaccgaagcagatcgaggacgaccggccgctcgtcatcatggcccgcgtctggttctgtctggtgcgtcgagccgctgctccctttctcctggtgcgttcgccgcggctgatcgttgctcttccctcgcaccgcacggccagtacgtgatcgagcatcagatgtcgtacggcaccggccggccgccgatcgttcgcgaggacgaaaccatcatccgctgccgcgagttcttgaaccacccgctcgcgatcgagacggatctccggctgattgcctcggtcgagatcatgtcgatccgaggtgcgtctctctgtccgaggtcgctccatgaggtcaacctgctgaccacgccttacctctcgcttgccgtggttccagcgcctctccatctccagatgtataacctgcccgaggaggaggtcgtcggccccgagacgctcgcccggctgcaccaggccaacgtcgactttgagtcgtggttcaaaaattgggacgcgatctttggtgagcctggcgtcctccctgcgtaagaaccggcagcggctgattgaccgacatgcactcgtccacccagaggcgcgcttcggcgaggagagcgacgtcttcttccgccagtcgctccggatccgttcgtccgcactctctcccgtctcgctggcgaaacgctgacccgggcgaccctcgccaacgtctgcagagaaggcctacgcgcagctctttcacaattgcacggccctccgcgaagttcgtgggccggccgacgtccggcagatggtgcccgagcagcgcgagctggcaaagatggccctccgcaacgcgcaagagtgcctcgacatctgcctccatgccgagtcgtaccgatgggccttcacctacgccgtccattacacccgtccgtccttttgcgtccccgtccgcccagcagacctagtcacttactgtcttcgaccgctcaccgcagacgtctgcgcggcctttgcggcgacgctcttgatccggctcgctcgcatcttcccgaccgagctcgacctccggcaaacggcgcgcgacgtgacggaactcgccaagattctctctaacgtccccgccggccggtacgcgcgctcgatccgcctgacgctgcgctcggctcggcgacgcaaggtcatgcctccgccgtcgctgccgccgtcgccctcgagccggacaaacgcgctccccgcacacggccacccggccgcgcccttctcgccctcgaacttcatcaacccggtaagcggactcacgcaggcgacgccggtcacctcgcggacgacgagtccaaacgtccagatggcaagcttgcccgagcaggcgagcctggcggtcccggcttccgcgggcggcttccatctcgacgggaccgtcgtctccgaggacgagagccccgtcgccgacttctcgatggactttgactggggctacacggctgacctgctcgacaaggtcggcctctcggtccccgaggggggtgacgttccgctgtacgtgccgcgtgcgccactgctcggcatgctcgttgactgactgcggccccccccttcccgtaacagctggctccacggatctgacattggctcctcgcagctgccctcgtccggcatggagaacttctttttgccatccgacctcgacttccggctctacacggccgacgatctctcggccggcggctcgggcgccatcccgccgagcggcggcggcggctttgcctttgcctcggagggcgacggctccatctggtagggttgcgatggatgctcgcgctgcttcttcgcacctctctctttgttcagcactacgccaacgacactgaaggcaaacaagggagactagggatcagaggatgggctgcaagggaggatcaagtacgtactccgaggcagtggttgtctcgtcggtcgctgacatcggtttagaacccgcgagttgctcccggactctggtgttcgtcgagggcgagggatgtgcagggaatcgaagggcgagcggcagagggagcgcaagcaggccgacaacaagccgtggtgagagggtgtgcagcaacactcagctcacctcttccttcgtcttgtccccctcagtgtcaggagacacaggcaggaagagcggctgaagggcaaattcacgtctggagtctgacagtcgcgtctccatcccaagccccggcatgcccaagtggttacaagtgcatacgagcttcagattggaaagggtctacaattaggcggctcgctcgtgtcagttttcccctctccccctccccaaaccccctcttggcgagacaggttgcccacccttggcacaggacaaccctgaaggacgatttatatactttgtttacgactggccgacgaagaggaggagaggaaaggattaaagaaacgacgcgcgccggccccgctctggctcgcagcgaaatggcccaggtcatcggccgttcgagctcgctgatcagcttttcaaaacgagatgggatgttgtttgcattcttaaaaggtgaaagtaagagcaggtggccgagctagtgggcgcgagagggaggaggtggacgtcagctgtgtacacagagagaccgatgccagctggtcgtcgtctactcgccatcgctggtctctctgctgtcttctccttgaggaaggtggtggttggtccggcggatgcttcgccgacagaaggaggcggcgaagacgacagtcggcaattgcgttgagaacgggttcgaatcggaaaagcgagcttagctttgcccgcctgagccctttcgccgtctctctcacatttacaatactgcttgcacttctgaaaaggagatagtaacgtactcacggccatacgcgacggtcgagaagcgggtgtaaaccattgttttagattattagattagaatgatactgactcttatcaaccggtcaacacgtgaagggggtatagtcaagtggttacgacaattgcttcgcattcaacatccgatcagtgattagcctgggttcgattcccagtacctccaatcccttttttggccccttctagctctcgtgccattttgcttactgctactcgaacccgcccttgatggtgggacacttttcaaagcagtcgctctcttgccgtcaagcgagctgcactgctcgccctgctttgcaggtcgctcgttgtgcaagactctgtcgtcgtcggcccgtcgcgccgcgggcgcgagcttcctcctcgccctcggcgccctcagagcccaattgcatctcaaccttgacgtcgacctctccctccctcatcctttcttcaacttcccttcctgcaggatgttccgctccaccccgcttgcccggctgctcgcccagccgtcactcctcgcccggtcgccgaccccgctcgctcgtgctgctgctgccggccccagtcggccagccgccctcgccggcagcgcccgcttctacgccggcgccggccacggcctcaacgacccgactggctacgtctttggcgagaaggtgcgtgtccagggagacatggcttgatcgcaggacttctctgctagtcgtagtcagtgcgggcagactctgacgtcctgctgctcggcctttctttgctgctcatcttgcacgacagccgccgcccccgggccagaagcggaccaaggagggtgcgtccttctcgtctcgcccgctgactgctggcctttctagagttgctgacgcctcacctgaccctctgctcgctatccacagcctgggagtacatcgttagtgcgtagaaatcgtcccctctggactacgagccggctgtcgcagagctgaccctccgagcctcctcgccgaccctcttccttcttcagtctggcccgtcttccttctgacgatcgcgtacttcaccgtcaactactacacgtccaaccagtgcgtgctcgacatgtctgcttcgaagggaggagggcgggggcgggcccccccaaccctgcctccctcctttctctccctttcacactcgcaagggacgcgctgacgaccacccctccgtcccttcacctccttcctgccgtctgtctctccagcggccgtcgtctccgcctcgtcgtcctcggtcaaccgcgcttcgtcagtcgcctcgtccgcctccgccggcgcctcgtcggttctctcctcggcctcgcgcccgctcgcggccgcctcgtccggcgccgcctcggccagcgcctccgtcgcgcccggctcgggcgccttcgcgacgtacggcgcgcccgtcctgacgaccggcctgctcgctgccggtgcgctcgccgtcgcgctcttctaagcgagacgaccttggacatcgcaccgtattcggtcttgcagcccctcggaaggcactcaaacggcacgacgacggcgtcacctttcctttcttccggacccgctcccacctccctctccttcccgttcgctagtacccgacccgtcttcagctctcgaataatctccttccctccctcctttttgttcgcgctcctctttttgctcccttcgatcgaacaatataactgcccggaaattgcgttttcgtccggacggaaagacgggagaggtgtcgagcgacggcggcatgagaatcggagaaggtggccaacggcgagtctccttgtcgatcgcccggggtgcaaagtcatcaagaggcggggtcgtcaagtggagcactgtcgagcagggacaaggagagagggcccggtctgtctgtcgggcgagtggcgaagcgcggagagtaaggcgatggtaagaaaaaggggagggagggccagcctgcccggtcgtccgtcggccgtcccctcttcttcccaactcccgacaccggccagcggtctcactcaccgcccgagatgccgcacgcccgcccgctcgagcacgctccgctttctcggcgcaccgtcgctggcccccgcgccgtcgccgccgccgctgccgttgacggtagtccagggcgcgggcgtcttgcctcctttgtcctttgccgacgtcggcgccggaccagtagcggcagcaccgggagcggagagaaaaaccgcaggcttccgcgccgccgccgccgacgtcgacgacgacgaatgtgctaggccatccacggtcgaccggcgcaagggagggcccgccgtcgtcgtcgtcgtcttcgaagcaggcgccgcgctttcgagtcgtcggtcgtcgtccttcgaccgtcccgaccagtcagcgacgcggctgtcgccgacgccaccgttggcgttgtcgtcgtcgttgtccagcagcctgttccgccagcctacgacgggcttgcggccgtctgttgatgcggcggcttcctccgcataggagggtgacgacgaaggacgcgttgtcgagctctgcgaagccaaagacgaggttgacggcaaggtccagggcgctgccgtcgtcgtcgtcgtcggcagtgagggcctgatcgtctcgttgcgcgaagcgaggaccgtcctccgaccgaccgccggcgaggacgacgagcgtgtgttcccaaagccgcccgccgccgccgctgccgccggcgtcgtcgaatcgtcctttgccggtgggacaggcgaggaccggagtgctggccgggcgtgggacgacgccgccagcgacgttgagtgacgcggggtggtggacgaggcggagtgggtcgatcggtggcctagcggtcgggcgggtgccgatgcagggccgcgagtgccgacggggacgacgacaggcgggatcttgaatgcatcgcccgccgccgccgtcgtcgtcgtcgttggccggccgggccgagtcgcactcaccgacgacgccgacgcctgcttctctcccagctcgcgatggacaaatgtaaacctgtcgcgcagctcgcttacgctcggccctcttcccgccgcgtccgcacgcccgccgccgccgctcgcctgctggaactggaggacgagccgctcggtcgcgttgggtttcgatcggccgccgagcgcgtcggacgggcggagcgggactgaggggatctcttgggccgtgcaggatggggaggcatcgaagcaagcgttgcatgaaggctggcgggcgacgttgatcagttgggccggcttccggcagcctacaagggggaaggagagcgtcaagtacgtcagagagggtgttctcgtgcgacattgccagcctgaagaggaaagacgcacggatgcagcgaaagcagcgctcgtggtagtcgcggccgttggccgagatgaatgggtcacctttgatgccgagcacaggccgggcgcaggccgggcagtcgtctcgcttgaacgagcgggcgtaacaggcgtagcagaggaaggcgtcgatcctggccgcattgcacgcgaagctgtcagcgtcgagtaagtcgagcggcgattttgcacctcgcacacgtacgagagcggatccgagcccggaatcggatagattgtcctgtcctcgccttcgccccggccgaagaacgtccggcactcggcgcaccgcgccgactcggtcgtccgtttcgaaagaacgctcccgcagaccatcgtcagcgaggcggtcgatcggtcgctcgagcccgtatgcgaggcgacgagcggcttggtcgttgctgctgtcgtcgttgtcgtcgtcgagttaaccggagggaaggtgggcgaagaggacgacggcggaggcggctgcgcgaggtgcgagagggtccgcgcgcgagagggggcggccgccgacgtaggagtcgacttggtcgagagggtcggcgtcgacgagggcgtccgtgtacggggtgaggtgcttggcggaggggtgcagtacctgcgacgagcgtccagtcgtgtcagcatgcgatggtctcgagcaacagcaaaggctcggaggagggtgacagggggtcgctcgcccgccgacagggcctacccctctgccccagcagctctgtcaatcgggcagacacactttctcgtccaagtatcgcgcccgggcgtactcgagctgacagcatcatggaccgcctgtgggactgtgaaagaagaagccgagggaggagggcaaggccacgaggtgagcttcgactggacgcgacggtgggaggagggagggacagctcgtcgggctcgagctcgctgaagagacggactggtgagcgagcagccggtgcagcgtgactttttgaggtcgagcaggtcgccgcacgacttgcagaagggcatcttgcgaggaggatcgagagggttgtggctaaaggtctcgtccaacaagacggacgcgaggcctgctgcgcgtccgagcttgttgcacccgcccgccggctcgagccatctttaagacgtcgacctctctctcgtcctctcctcgtacacgacattcctccaggctggacgagagcaggccagagggtagtcgctcgtgccgcgttgctgactccgatcgaaggggttgctctagagagtgccggcccccttacgcgcgagagccgcgcccactgctcggagacggaccgacaacagcaggcccggttctgcgccaaaccgcccgtcccttcgttccgactcgtcataaagaggacaggggcaggcttcttcgcttatccctcccatctcgtccgctttcaccagattcgccttgctatgtcgtcgcccgtacccatctcgttcactcagctctcgccgctggaaaagccgagcacgctcgtccccttcccggacgactcaaagatcatctcgtccgacggccggaagctttcctacaccgtgcgtcgccatcctcttctcttcctgctgcttccgttgccgagctgatggtgttcatgctccccgctctcgcagacggtcggcaaaaccgactggtggcggactccgcaggaggagcgcttctcgggcccgatcctcgggatggaggtcccgaaggaactcgtctttggcgacaaggcctggagtgtcggcgtcgagctcagtggcgagtgggtcgaggagttgtcagtcggatttcctttcgcagaggaggaacggatggatgcgaggctgacctgcgcgactcgaccccgtcccgcctggcttcctcaaagcgaccagggtgcgtcgtctcgctccagccccttccaatggccgcgcagtttcgtgaccacgagctgaaccccgtaacgacgtctcgcagcctgcctcctgctctatcagtcgtcgacccagtggatcaagacgggcatcgagtttacgcaaggtgccgccaacatctcggtcgtcgccgtccagccttacagcgactggtcggtcccccggccggccaaatgatcttaccttccactggacgctcaactctcccttccccgcaggtcgctcttcccctcgcccatgtcgcccgacgccaagcttaaagtccgcatcgtctttgacccagcctcagggctcgccatctcagccgtgctcgacccgtcaaaggccgacagctggacgctcatccgcgaggtccggcactggccgaggccggccaacggcgggtccgtctgggtcggcgttggcgggtgctcgcctcaccccaactcggtcgagggcgagaagaaggagggctgcaaagtcacttttgagaacttctggtgcgagtgaagtagggtcggagacgacgggagatgctgatgacgcgttttgctgcaagagcgccaagcgtgtcgagagagaggggcatggtacaggctctgacgtgaagcggccgacgggcctttatctcgtcgaccagttcactgcaggtcgagcaccaccttcccgacaagtttcgcccgctccatcttctcgtagacgtcaggcagcgcctcgacgcgctcgacatggtatcgcgtcttgacacggccggttgaggcgatcttgagggcctcgatcgtgtcctgccgattgccgacgcacgtctgcgcgcgagagtggaggaggtaaggtggtcgtcagtgcctggccgatctcaactcggtcggagctaggacgcacgccgaggacgcggagcgccttgatgaccattttgaagatgggcgcctgaaggacggcgtcgggcgggacggcgacgacgagcagcgcgccgtttggccggaggtactcgatcgctgcgcagggcgaggcaaacgcgagtcagcaaagagggtgtgacaaggtcgggcggggaaagagggcgatcgactgaccctggtcgtaagctgtcgcgccggttgcgacgatgatggcagcatgcgctccgccgccggtcatctccacaatctccttttcgacgtcctggaggaagcggcatgcgagggttagtctgcaatgaccttcgaagagggggggcgcgacttacggcctttttgaagtcgatgaagtggtcagcaccgagctccttgcagagctgcaacttgtcggcgcctgtgtcgacggcaatgacctcgtagcccatgctagtggcaggtagtcggacggaaggtcagcccaagaatgggcgcaagagacggagcgtggcagggctcacacgcgcgcgtactggatggccaagtggccgagcgcaccgccagcgccggcaatgacgaccgactggccagcggcgagctgcgccgtcttgagcgccttgaaaaccgtctgagtgacgactcgcaagcaaaagccgtcagcagccgcccctcaaggctgacgcagcgtcaaagaaagagaagcgcaccacgccggcgcagaggatcgaagcggcctcgaagagcgacatgccgtccgggatgggcgagacgtggctggcccaggcgacgacatactgggcgaagcagccgtcgacggtgaagccgtggcactgaaaaccgtgcgcacgcggcgtcagcgattgccaaagagtgacggcgagtgaaggacaggggcaaacctggccgttggcgcatgacgactcgaggcccttacggcactcctcgcacgagaggcaggtcttggccgtccagcggacgccgaccgcgtcgccgatcttgacgtcggtcttggtattcttcccgatcgctggccagggcatgcgtagacaggaggagcaggttaacggaccaagccgagcgcatacatgcaggttggctgccattaccgaccggcgacgtagccggctccttcatgtccgccgacaagaggcaggcgcgacggggccgggatctcgcccttccagatgtggaggtccttcaggcggaaaaagactgaaagtggtcagacgtgtcgcgcatacagcccggtcgaccgagcaggatcgaagatacgcaacgctgcagattgacgggcgggagcaggccaagccacatggtcagccttagcacgagttacagaagagtctgccgagctactcacgtgtggcagacgcccgaggcgacgatccggacgaggatctcgcccggcttgaggtcggccggctggacgaccggccagtcggtgcggctctcgagcggagcactgtgcgtcgagaaaacggcggcctgctgattggcgggaatgtcgtacgaggtccgcgaggtaacgttgttggttgacatggcgaacgcgtgcgtgtgaagggggagaggaaggcaaggggaggtgagatgatgagcgttggggtgccgagggcgaggtcgtctcgctgcggccgcccctttcttcgagcggcgcagcgttgtgcatggggtcagcgaccgtccgtcacccacacgaccctcgcgagacggaaggaagacgcttctcgtgacggtcatcatcaggacactcaagagctggcctcccgctctgcttacaacgttatcgctacaagtcaacagtctcacactcactcctcgctccccgctctcgctcgctcactggcagtcgagcacgaccttgccgacgagtgtcgcctgctccatcttctcatagacggtaggcagggccgtcaatggctcaacgtggtacgtcgtcttgatgtggccggccgcggcaattttgagggcctcgatcgagtcctgccggctgccaacgtagctctggcgaagacgaaaggggatagggcgcgcgtcagtctaaagtcttgcttggcgaggagaggaggttctgtacgccgagaatccggagcgacttgacgaccgtcgtaaaaatgggcgcggttatggcggcgtccttcggcaagccgacggcgacgagcgcgccgttcggccggagatagtcgatcgctggcaaagcggaaagcaaagcatctgagcgagaagctcgggagacgagcgtgagcccgcgtccataccttgattgtaggcggccgcgccggaagcaacgacgatcgcggcgtgtgcgccgccgttcgtcagcttgttgatctcgtcgacgatgttctgcggaagaggagtgagagacgaagggtcgtcagattccgccggcttgaaaagcgcagcccacagggatgcacggccatcttgaagtcgacaaagtggttggcgccgaggctctcgcagagcttctgcttgtctgcgcccgtgtcgacggcgatgacgtcgaagcccatgctgaagagcgggcggcgagtgcgtcagccccaagtcagtcagtgctgaatcgagaggtctggtgactgacttgcgcgcatactggatcgcgaggtggccgagccctccgccggcgccggtgatgacgaccgactcgccggtcgtcaggttggccgtcttgagcgccttgtagacggtctaccagagagcaggcagtctcgcatgtcagaggccgggcggttcaaacgacgtgggcgagcttgagggacttacgacgccggcgcagaggatcggagaggcgtcgaagagcgacatgccctttggaatgggcgtcacgtgcttcgcccacgagacgacaaactgggcaaagcagccgccgaccgtatagccgtggttctgcgggcggtcggagtatctgagcaaagaagagcgaccagggaacgagcaagaggcgagagggacggaccttgatcttggcgcaggacgactcattgcccttgcggcactcttcgcacgagaggcacgagtcggccatccacttgaggccgacggcgtcgccaaccttgagctcagtgtcggtatacttgccgatcgctgagaaacgaaggatgatcgtcagcggatctcacagcaggcaatcgcagctggagagaagggagggccgggcgactgaccagcaacgtagccggcgccctcgtggccgccgacgagcggcttgatcgaaggagccggccactcgtccttccagatgtgaagatcctggtgggttgtaggatgggaggcggggcggggttagatcatgggcaggcctgaggttcgctgctgcgcttggaagggagagacgtacgctagggacgatcgagcggaagatcgaagtggaagaaggcaggcagagtaaaaagagtggcatcagcctcagaatgagccgccgaggagctttccaagcgagtcacgtgtggcagacgcccgaggcgacgatccggacgaggatctcgcccggcttgaggtcggccggctggacgaccggccagtcggtgcggctctcgagcggagcactgtgcgtcgagaaaacggcggcctgctgattggcgggaatgttgtaagaggtctgcgaggtgacttcgctaggcgacatggtgagggggagtgtctgaggaagagaggaaggcaagggagggtgaaatggtgcgggcagaaggaaagaaggcgagtgtcggcccggccctcttgaggggcgtgagcagcagcgtcagcgtcacatgcgggcggccttcctccgcgggtagtcccggggagcaggcccgcgaagaagcatcctgcggtgggcgtcggaaggagcaggagcgaaagcagcaggacgagagcagagcgcagagcgcagagagcgaccgccggcgcagcagcccttgaaagagacgccgagtggcctctgcctgcccgccctcaaccactcctagaagcagccttgctcgaggaacagattatcggacctacgctcaaatctcctttcttccgtccccgactcgtcttttgctcgaaggtagcccgccgaggaaccgtttgtcgcttcttcggccgtcttccagcggtgagcctggcgttcgacggcgggcgtgagactcggcccttccgatggacgacgacggcagcctcgtcccgggctgcttcctcctttctttccgaggtgctcgagacgtgcacaagctggatgtcagagcatcacttctcgaccaactcgctgtgagagccgacgaggagccagcgaggggccgaacgactcgagtcacggccggaccccttcgggacggagcggctgcgcgcgcagacagacgtggacctcctcctcctccctcccctcctcctcaatcatcatcctcttatcatgcccgccgcctccagcacctcggtctcattcccggaagccggccagtttgtcgaggctgtccggtcgtcggccgcccgtgctgtcgaaaggacgggtattgaagtgcgtcgggcaggccctccgtcttctctcgagccagagcagccgatactgactccttccgctttgcaggtgacggacgagtcgatgcgggccttcctgagttcgctcgaccgagccgactacctcgcgctcgcccaggaccacggggcgacagccctcccgctcgcgtttgactcgcccctccaggagctcaacctgctcgccgtcctcgcgctcctcaacttcgggtcgtccttccgccggccgctgcacgcccaccacggccggggcgtctacgagacgatccttcaactcgttctcgcttgccacatctcctcgacggcgtcggacgagctcctctcggccaagtcgatgagcaccatttcggacacgcgcatcgcagagctcatgggcggcctgccgctgatggaggagaaggcgcacgagtcgctccctggcatccgggtcgggacgaagggcggccggctggccgagctcgtcggcatggtccaggccgtgatgaatacgacgggccgggtcctcgtccagaagggttaccgtgacctcgggagcctcgttgctgagctactgaagaacgcggcgggtgcgcacgccggcgatgaccgggcgctcgtcgctgccgtcgtcgagggcctcgtccggacgatcccggccttccaggacatgtacctcgtcgacggcgagcgtgagtcctgccgccgtctgccgccctcgtgtcctctctcacgctgatcaaatccgtgctctcacaccgcgctcacagccgtctacctcttcaagaaggccctcatcctcgtccaaaccgtctcgcagcgcttcagcccggccggcccagcaagcccgttcccctgcccagacacgacctcgctcgtcccgatctttgccgacaacgtcgtgccttcgctcctcgtcgcctgctcagtcgtcactctcccggccgactcggccctcgcagccgccttcccttcgatcccgcccgcggcggccaacccgctcctcgccgccaagaccgaccggaaagcgcccaagggcccgacgcccctcggcgggcccgagctaaccgtccagcaagcggccctccttcgctccgcggccgtcttcgcctgcgaccggctggcagcgtacgcccagagcggcgcgctcgatgccgtcccgggcgcagagtgggtcaaggcggacgtcaccgcgagcgggatcgacggctatctgtgggcgggcggcaaggccaagccagagtggcgccgggtcgagcggttcgcgtgcgactccatcttttattgaacgaagaccagcagcatcaatcgaggaacaagtccctagatgacctgaatggccgtcgaggcgggcaacgcgaggaatggcgaaggagcaagaggaagggcggccggctggcagggtcgagcggcctcgtaggggggggggtgtcgacatgtgccgccctcctatctcttccaagacgagaacgcccgccggccgaggaacgattataatcgcatgcccgcatccccccttgcttcatcatcagccgacgccccaacccgacaccccaaactcgacccgggccggccgtccctctctccctgtccgtctcgagcgagcgcccagccccctttacagcaacgctcagccgctcgccctgcaccctggctgcagtcgtcgcttgtcagtcagcgtcggccagggaggaagcaagagaaggtgtcaaaagggtcgaagctgtcgggacgtgagcgcgtttctgacgaggcatggagagcgaccagcgcgcaagttggcctactgacttggacaaagcaatttttcaccacgacagaagagagcgagcacaaaagaggctgcgggcaaggaagtacaagcgggcgacgaatgaaaagaaagcaagcaaaggaagagcgtccgtgagagtctcgacgatgaggaagcagatcggccggtaagtagtcggagtggcgcagagatcgacacttcagtcccaggccaggttgagggcggtgggctgtttgccattggcaccggcgtcagacaatcgaccgctgccgccgatgtcagtcgtgagctggggggcgggcgaaaacttgcgagcggttggagcccgtgccgcgccctggaagctgaagcgctcgtcggttggctggccagacgaggacaaaggcgcggacgaaggcatgccccggccggcggcttcggcacgggacgagctgagcatcccctggctgaggtgacgcccgccgtcgagcccctggctcgtcatccggtcgcgggcgtagccgtcgatcttgcggtactgtgtcggcggcggctcgatgaggcgcatgatttgctgcggtagggcatagtcagccgcttgggcgaaagcgcagtagcgggcgatctcgaggtgaaggttggggtagtaggttgtcgaggccttgcgggcggcctgatcgagttagaaggcgaagtcagcgccggagagctgcaatgcagagcgacaagactgaccaagatgatccggtccagcccgctctcgaaaagctgggcgtggaagcgccaagcgctaagctcagactcgagcggctcgttgtgctcaagacatgagcgcgacatagcgttgatgagcttgaagtgggtcgttaggtagttgccggcttcgtactcgactgttgagtagagcagagaagagcatgtcaggaccaacgaagacgcccattctagcccgatggagtccaggacgcaccgccacccgtggcgcctccgggggctgtcgggcgctcgatcaggttggcgtcggtctcttcgagctgccagatgccgttgccgtgacagaacatccagaaatagtcgcggctgcgcgagagaaaggaaagggtcagccgagtgcatgcaactcccggcgagcggagggcaacgagccgcaccagacgtccgagatctcggtgaggtatgtcttgaacaccctcggccggcgggcggcggtaacaaagtcgacgaggtccttgtccttgtcctcgccaagcagaagctgccgtgcgagctgcggtaggctgttgaactccctcggcagtgggaagatgtactcgcggccggcgggctggtcgtcgcccggccagcgcggcggtgccggccgagtcgggtagaggtcgaagagaagtgtcacaatctcgactatgagctgccgggttgggacgtccccgggcttcttgtcggtgaagaggaggctgaagagcgggatgaaggggtttggcgtgcagccgcggatggcgatgcagccgacgtcggaagtcgccagcgccttaatgcagcgcaaaagctcgtgtagaagctggtcgtcgtgctgctcctctctacgggggcgagtcgaagagccaggatcagccgtctgcgacttttattgactgacggctggcaggggacgcacctccactccattgccagcacctcgatcagccggcgcagcagcgacaggtagccgcgttcctgcaggaacacctcgagccagctgcgagggacgagggaggtcagcccgttgctctgtgacagcgcgacccaacgcaattgtgtgacgaacactgtcgtctcttgccgaagcagcatccggagcttcttgaccttagcgatgtccatctgcgcggccggcgggccctccttgagccagcgagctatcgcgaccgggccgtccatcgccttcgagctcgaggcagcgctcattgtcgctgccttcttccccttcttgccaggcgtcggaggcgccggcgaggcgtatgcattggcttggctcgagctcgtgagcggtcgctgggccgagccctgctggccgttgggcccgcgactgaattgcggagatggcgtcgcatagtcgggcccaacgttcagcgaggccgaaagtggcgccgagatggcgtggccgttgacggctggcccgccggtcggtggccgggttggagtcgaggagaggttgaacgattgctgcggagcggtcgtcgcgcgtcagctcccgtcccgagctgctcagcggccacctgttgccgttctgggacttaccgagttcttgaggaactgctgtttgacgtgcggctccattgtgttcatcttctcgcgcacgctcgccgggacctcaaggacgttctgcagcatcgagagggagggggtgccaagatattcagcgtcggcccttgaccgccggccttgcgccatagccttgccagactgaccatcatgttctgaaagtcgcgctcgacgtcggccatgttgactggagcagaaggaggcgtcgagtaggacgcgggcgactggctcgagacgtcgaggctcctcgaggcagcatgaccgccatcggggcgccggccaggcgtccccctgccgacggcgacgctctgcggccgcgtcttggtcgggctgctgctggcaccaccgttaccgccgccgatgtgcgatcggctgacagggatgccagaggggaagacgggcgggccagctagggtcgaagaggacggcgagcgctggtagtggtagccgttgggcggccgctgcgtgcttggccgggccggtgacgagaggttgaacgccatggcggagggtgccagggcgagctcaggcgtgcgtgggagtgagaggagccgcggaaaggaggtcacctcgagtctgtgctgagagatccgggagatgaggggggtcggagtgtcagggacgagtgcagtcagccgtgttggccgagcaacgccctcggtcgtcgacgcgaacgacttgtccctccggcctataggttcccacgctttcgcgagcgcgcgcgcgcgccggagcgatgggaaatcaggcgcgtcggcagaggaaggctcatcgacattccgaggagggacgctcgaacgagcgcgaacgggacgggcagcgggcagagaatctgaggtcgttcacaggagacgaggtgcgagtgggggaggctagaagcaggccgatgcaaggtgtgggtacggagatgagcgggatatagtcggccgggcggccgaagaagggtcgttgcgatgagcgtctagggcttgtactcgaggttgcgcttgacgtaggcgaggatgtacctggggacaaggtagagaggcagtcaggattgaagctgcgcgcaatacacgagcggaggagcacccacggcttgcagctgagaacgatctcgaggctgctgaggccgaccttctcgtcgtcaaagtagtaccagtcgttgcggaagcggcaaaagttggtgtctgtcgcggggtgcgtcgagttagcgtaatgaaagggacagagaggatgatgggactgcgcacagtgcccgttgttgatctggccgcggtggaggacgacggcaaaaaggtcccagaccatttcatccgcctcgctcgacttgaccttgccaccggcgcgcgctgcccgcgtcgtgtagggtgtcatgtcgatcgaggacggaaatttgactggcgtgtcgatcttgatcgactggtcacccgacttgtgctcgaagcgctgcgttgtcgagaggggtggcgtcagcaagggcccagcgccgggcggcgaagcgcaagggcctaccttgaactggaaggtgaggaccggcggaatctccttgatgctgagttgcttgaccgcgtcctgctcgcatagcagtgttcgtcagctagagccgctgctgcgaccagataggcgcggaaggccttacgaaggaagagatgtgacatgactcgcaaacatactgctggccgagcttctcggggctcgtgtacctggagaaagacagatgaagcgcattggtctcggttctctttcagcgcagcaccggcgtcaaggactgaccgagccagcgacttggcgagcgagttctcgccctcaatcaggacacccgctctcgatcggaggtcgagcgagatatcgagcattgggtcgacggccgagctgatggcgccgcacgaggcgcagcagacgtcactctggagcttgccatagaatgtcgagtctgggattggagattgcacgacgtcagactctgttgaggggcaaaggcgatgccattcttttggcactcacggatggcacacttgcagtcgcgctcggtcccacccgaattctcgtgcatctggttgagggcagcgataaagaacctgcagaaagacgtcacgatcagccgcgtcagttctagccgtcactcaaaacttcacgaggaaagcatgccaactcatggcagtcttgctgggcgtagccggcgaggtgatccgacgactgccacatgttggccaggaatgtgatcggcccgtacggcgtgcggtcgtccgagttgaactggaagcgcgcagccagccaagagggaaagagtcagcgtcattcgtggaggcgtccgcagtgcgtctggtcgcacctcggtaaagatccgatccatctcgcagcatgtgcagtcgttctcggtgcagaggcccgggttgtggtagtcggccagaaagtggtcgcggaggagtgggttgtgagcaaagatctgcaggatgacgttgagaaagcaggtctggcctaagaggcgggagacaaagtaggcggtcagaggtcggtcgttcggcgcgcgaggccgatgcgcgggcgcagtcaaaggcgcaccaatgttgcgcagcccacgaagacctgtcagagtgacggacggggctggtcagcgacgagaaacaagctgcggaaggatgggcccgctgacctcggcatccgagagccgtcgtgcgcttgagggcgtcggcttcggcctcgttcgactcccaggcaagggctgtcggccgcttccgctttgcacctgcgtcagcgaggcaaaaggctcaatcagctcctcgcaatttagcaggctcctcgggggaagacgcaccctgcttgcgcgcgagtacacgagtctcctcctggatcttgatcaggcggcgctccttgcgaaggacggccgaggtgacgaaatcgtggcactcggcgcagtgcaccgctcccgagaaggagtcaacgcctggagccgtgagctggagtatcagcacctgtcctttgcgggaggcagcgagaactggggacagactgaaggcgtgagagagcttgcggccgtgctcgaggacgtggtcgcccttgccatgcgtccagctcaggcacccgacgaacgggcagctgaggcaggcggccggtcggctgagcacctcgtcgcagcttccgcacgtcggcggctggacctacaagttgcacacggggccgagcctcaaccgtcagccgtagctgtaggagagcaaaggaataaaataaggcggacgtactgttgccttctccttgcccttgccggcggccagccgttctcggacggcccacttgacgatctgtcggtagcggtcgagcacccgccggccctcatcaccggcggccaggagctgcgccaggtgctggcactcttgcgatggtgtccgactgtcggaccgggcgagtactgacgacgtcggcaccggagccgccgctgtgacagctgcaggagcgggagctggcgcaggaagcaccgtccgaggggcgagcggagggaggagcgcagccggaggtgcaccgccgccgggcagcgtcttgacgcttgcgaccggccgcggctgggccaccatcgtcttgctcgccataggtggaaggcagagtagtaggaggaccaggagaagccgtgtgcggaagaaggaggtggcggtggcaaggacaggtaaggaggtcgttctaaggtaaagagggcgtcagcgggggcggggcagccggcagccagcatgcaggcggcgcggcacgtcggctatgcgtacggcccgcctctaggatccggctcgcatcctttcgtcagaacacaagctgggcaggcttaatgcggcgtcgtaacggtctgatcatgcgcatgtagacatcctagctcgtggcaaaccagccaaggaaaccgcctttctcgccgccttccccaccaggggcgccttcgagctccttcttgacggcctggtgcaggcgctgaaggactgtgcgggcgagagtgcgagaggaggtcagcgagatcgtggctaagcggccagcgaatctggacgcacagtcgccataagccatctcgccgttgttcttgtcctcgacgagcatgttggcaaactcgagctcggacccgtcgaggttctgccgggcgatcgtcagcggcagctcgtggccggcctgggtcgcgaaatgctcgagcagcgaccgcagttgctttgagatcggagtcgggagccgcgggagggtcgactgcggggacgggtggagcgctcagcaaacggacgctagaagccaatgacgggagcatcgactcgccatgcgagggtcgacggcctcgaggtcatcgactgcccagaggtcttcaagcagcttgggcgagaccgaagcaccgagccagaggacagcagcctcgccgttgactgatgggatgcggtagcgtcagccagttgctctcgaaagccgcgggcagagcaggatcagactcaccgagcaagtacgcgccgtcgctctccatccactcgtacccgagccgcatgccctcaccgaggacgatccggccctcggcgccctcgatcggctggccgacgtcgtcgcccatccggtggacggcgaacaaccgcgggtagaggtacgtcatgagcgcccgaggtgacgaggcctggacgaggcgccggtgctggacgcgcacgtcggacgtcaccggcgagggcttgagcggcttcgacttgaagagggcaagcaggaagagagggagaagggtgaatccttcgggcaggacgagctgaacatgggtggcaacaatgtcagtctcagaccaaacataagaagctcgatggtgaacgagtgcgcacctgacccagtggcgcgccgagagcgcagttgcgccggtagctcgtcagaatcttgacggcccgccgctggaggtcgtcccggacctcaggtagcgtcttgctgtccatccgacccatgccctcctttgcaaggataccgatgctcgcatccgggtcggcgtagcggaagacattgccgattagcgaggtgacgccgagccggaggttaagcacccggactcgccgctcacccgcacgcgtcgtgtgcaggatcgcgatctgaaccgaggccggctcacgttcggtcaatggtgagccagagtgagcgaggagggcaagcagcgaggctgtcggcgggacggccggaaggtcgacgtcggtcggcgagcgctcgaaaaaggagccgacgtgctgggcgacgcgaaggcccgtcgagcagcggatgcggagcgttgcgttccacgcagagggctggtgcaggactttgcggagcgacgattgcaaacgagccgcgtcccggaccggatcgaagcgagggaggtagaaggtctccccaccggtgagctccgagatgatgcctgtccgggggggggggggggatcgaggacagagcgaagcgtcagcgaagcgggctaatgtaccctaggagttggagcggacgcacccatcgtcgcgacgtcggcgtagccgctcggcgcgacccagaggttgacaccgatgccccactcgacgcactcctcgccgagcgtcctccaccaagcgccctcacggccctcgcgaacgccaaacagcgtcttctccttatccgtcttctgcatggcggcctcgtcccggggctttggcagcgcgccaaggccgagagacgggggcgtgagcgcgaagacgtgcaggacaccgccggatgaggcggccatgactgagagcgcggccgagagggccgagccgatcgcgtgcgatggagcctgcgaggaggcgtggagggagggcaagagcgcgaggagcgagaggacctgcgagctgtggaaaagttcgacaagaccgtcgtcagcggtccgccctggagagtgaggggagaggacaaagtgagacgcacgctcgcgactcggcgtcgacaaagaagccgcttggcggcagcgggcagaatggctcctcgaggtcggcgaccgtcttcatccgcgggccctcgctgtcgccaagatcccaaaagtgaatctcggtcccctcgacgccgacaaaggcgacctcctcgccggggccgagacgcgacgtgaccgagagtccgtcctccgaggcctcgaagagtgctccgcggacggccgcgcaccaggcctcgaggaagcccgaagcggtcgcattccacgagacgtcgaggacgaagaggtgcttgagcggccggggctcgcggaacgtcggtgcctgcgtcgggccgagggcgagcgacgtcaggcgctgggccatgtcttcgtcctccttggcggcggcggcctctgcctttgagatggcccgggtggcagtcgactgggtcgcgtcgagcgggactgcaacggccgaggacgagaagggcgcatggcgcgggagtgggaagttataggccttgggcacggcgtagtcgattgagccgagctggatctcgaggcgcgatgccgggtccgtaaaggtcgtctgatagccgcttgtgctgacgcccgacgtgcctgtgcagcagagaggggttccgatgtcagccgtcaaactcaagctagctctccctccaaacgcactcgtgttgatcgtcccgcacaggttgcatcgccagcgccctccgccctcccagtggcagaggctcgacaggtagcccttgcagttgcggcagcgttccgggccctcctcgcctgggtcgatgacagggatcggagtctcgccaaagagaggctcggcaaacggcgtcacgtggatgccaaagggcagttgcgacgaccggaggagatcgcccgtcgtcggcacggccgtcagcgacgaccggacgaaagtcggcgtcgaggcgccttcgtcgaccgcccgaaagtcaacctgggcccccggcgggccgccctcgagcgccgacgaccacgacccggcgttctgcgcgtcgttgaactgctgggcgtgggcgaggagcgagatgggcgacggcacgagcgacgggtcgagctgcggccggccgcctgcgccgccccgcgccggccggccggtcgagtgcggtggttgggagatcgggttgaccgggtaggcctgggacggatagtcctgttggtactgctgaggctgttgctggtactgctgctgctgatcgtaggcctgcggatgatgttgctgctgctgctgctggtaggcctgctggccgccgtaggctggctgctgctgggcctggtgcgggttggacgggtcaaagtactgctgctgctgctggtactgctggtcgtaggcctgctgcggttgctggccgtacgagtcggtcgaaaggatggacggatcgaccggccgggcgacgcgtttgggcggcattggaagaggaagcgagagattgtacaagaaggcgagagagatgggcggatgcgctgtcgacgtcggaggcgagcgagcggggcgagagcaacagcgggtgcagcagcagacagcttcggccctgccaacgacgatccttctcgccccccctccctagccagcagcacagccagtggccagaatacagacggatggcacccaacccgcgatgcttctttgacctcgaggtcgacagcaagccgcttggccggtccgtcgcacctgcccccctttgctccgcgcgaagactgacgccgaagccgccgcgtcctgcctgccctccctccccctcgcgcagagccgtctttgagctctttgctgaccgtgtgccgaagacagtcgagaagtgggtcgcctccgaggatgcaggcgatgccagggtctgactagccgctcgtcctgccagctttcgcgtcctctgcacgggcgccgccggcacgtcggccgtctctggcgtgccgctctgctacgagggctcgctcttccaccgggtgatccgtttgtcgtctgatcccgtctccagcagcgcccacgtcgcgttctgaccgactctgccatcgaactacagcccagttcatgctgcagggcggcgacttcacaaagcacaacggcaccggcggcgagtcgatctgtgcgtggtccgagctcgccccccttcagcgctaggtcgcacgagctgaccaccttcgtgcactgctcatcagacggcggaacgttcgctgatgaggacctgtcggaccctgttgaccgcgagggcctgctcgtcatggccaaccgcggcaaggacacgaacggctcccaagtgagatcgcgtccccccttcctccccttcctgcaagctgcgctcgaagcccgacggcgccagcttgctgatgcgaaattgtcacagcagagggtccaagccgaggtgagtacggatctcccgttctcccttccattctgagaggccgtctgacacctcaattgacctcgcctgatcaggaacgcgcccagcgaaaggctcaggaagaacaggtccgtaaacgagagccaacgcgtctttgcttcgaatgtgtagactaacgccagtatcggcctgacaggagcgaatcaaggaacgccagagtgcaggcgcagtggctgaggccaaggtcagtcctcttgccgcttggcccgatccggtcctcgcactcaccttgcttcgcgttcgctccaattaaaggaaacgcgatcagacgcgcctcaagaatgcgcacgcgcctttgctggcaaggcagcgccaggctgctcagcaaaagatgcagggcagcaatcctacacagcctggacaaccggcggccagggcacccaaaccaattgaccctgcgctgccgttcgtcccgcgcgaccccagggcctttacgccctccttggcctctcgccgcccgacttccgaacaatcccctcggacgacgtcgttcgcgaggcgccgatcgagcagctccagtctggcatccgaaccgcgacggcggcgagcacgagcgagcgcagcggatcaacgcggcctacgaccagctcgcgaccggtgcgtctggacaccatgcttctccttctgcggcgcgacgggtctgactgatgaccccctcctgcctcgctcgacagaggagctccgggctgcctatcaagccctatacgcctaatgcgaggctggccctgcagagttccacttcttctgatcttctagatgagccgtcttctatgaatcaagtcctgtgagcctagaggtctctagtggaggaaggcgcaaacgccccacagctcatgccgtcccggcctgggcgaccgcctcgcctgccttgaccctaaacgcctcgagcgcccgcttggcccccccgccccgcatgctctccctcgcgagctcgacgccggcagcgaacgagggcgcgagtccagcgacaaacaggacggccgaggtgttgaggaggataaagtcggtgatggcctcgacgtctgcgccctcggccagcgtgccttctggtgctttgaccggcgacgacgacgggcggggctcgaggagggcgttgagcagaagagcattctcggtcgacgagaggcccttgacggccgagagagggtggcaggggaggttgaagtcgcgcatcggatggaggaggagctgggtgaccttgccgtctgccagcaaccatgcctgataaatgaggtgaatggagggaagacgacgcgggaaagagtcagtggcgttggaagagaggggagcgggagacaaccacaggcctcgcgttgccgatggcagaaacgaaagactcacgtccgtctcgcccgccggcgaaatctcgtcgagacgctcccgaccacagacgacgagcgcccgctcagtcccgagctccctcagggcctctgcaaacacgggcccgagtgccggcttaaagacgccgaggacgataccggccggcttcgctgggttgacgagcgggccgaggacgttaaagagcgtccttgtcgggagctccttgcggagcgggccgagagcggcaaaggccgggtggtaaagcgaggcgaagaggaaagcgaagggtgaggagcgggtgaggattgtcgggagcgacgaaggggggaaggtgagcgggcaggcgagcgagaggaggaggtcggccgagcctgaggcagaggtcgaggcacggttgccgtgctgtccaagcaggaaacgagaggttcagcacgaggagcgcagacgacattttgagtggcccgcaaggtggctcttgttcgaaagccacccctccctccgaaagagacgtaccttgcagacgacggcgccagcgccggcggcgacgatgccggccgaggtcgagacgttgaatgtatcgtgaccatcgcctcccgtcccgacgatgtcgacaatccggcagccctcttgtccctcagcagcgggaagccgggctccgagctcgacctggacggccgacttgcggaggacgcgcgcgctcgcggcgacgacggccgggtcgagctccttgcccgtcaggctgagggccgtcaggaacgagccgacctgcgcagccgtgcagccaagaggaaaacggacgacgtgctcaaacgcggccgtcgcagcagggccgtcgaatgaagcgggcgagttgatgagctgtttgagcaggggcttgaaggtgtcgggtgtcggggccggcggcgcggccgtagaagaggaggccgccgagggctcctgaagggcggccatgcgagagagtgtgcgcaagatacgaagcggatgcccgaaagacctgggatgaaaggcggcgcgatggggtttgaaagcaagatggtcgacgggagcaaggtcggacgcggagtcgccgtgtcggagggaggaacgcggcgcgggctgtcgactgtcctctgcagctgcagcccagcagccgagcaggcggccgcacgaattctgcctcgcctcacccggcaagcctgtagctatgcgagatgatatgagagagtggctctcatcctgccacccctctgcaagcctcttttgtattttgtctgcgtgttgacgagagggtcgagtcgaaagctcggtcgcagacttgtggctgcgcctccgcctcgcctcgcccttcgcctcttgtgccagcgcgcgggcgcatctcaaccttgtcgtccctcccttccatcaccacccgcccgtcctccttacttctccctctatctcgcccacgatggacaagcagctcatcagcctcatcaacaaggtccgcttctccatcccttcattcgaaagtggtggtgttggacggcaagcagagagactgacgcttgacccccaaccttctcgcttacgccgctcaccccctccgcgacgccagctccaagatgtcttctcctcgataggcgtccagaacccaatcgtccgtcgcgcaatctcctctcctgcttaccagctcggcctcgagtcactccgaagccgtacgctcgctctcatgtgacagctggaatctaaccgcgtcacctccttcgcctcgcctcgcctcgcctcgcctcgcctcgcctcgcctgctctcgcctcctgcccttgcctttcatcacgcctgcgtgccttatccgcacggcctgacaggatctgccccagatcgcggtcatcggctcgcagtcgaggtacgtccgttccctctcatctcgaagtcaggtctggtcagtcgaagcgcgaggtgtaggatcggcggcagctcctcgacggcttgctcgagctcaacgagctcgcctcttcgcgcctcggtatcgaggcgccgctcctatcactcgcgctcggagcttgccagagatttgaaggtcgagattgccgtgacgtagagggctgacttgctcgtccttctctcctgccgcccgtcgtcgtccgacatctcgctcctcccatcacaccatcctccacccttaacagcggcaagtcgtcggttctcgaggtgagtctgaccattggctgctgagaggcgtcatcgttcactcttcgcatcgacaggcgtgactgacacctgtttttcctccgttcgcagaacattgtcggccgcgatttccttccgaggtgcgtcgggccaagaggctcgcgggcagcccgacatcttctgcgagcgccctcctggccctcccttgatctttctggctggacgcgtccgcctacatgaggctctccggagtttaacctctgggagttgggaaggcacgaggtcgccaaggaggatcgaggttgctggcgggagatgcaccggtgctcgtgtgagcgaatgggctgactctcgctcgcctatctcgaatcgctctcgtctgtgctcacagaggaaccgttcgtaaccaattgccttgctccgctctgagtccagcagggagaggtgctctgaggtcgcttgagctgaccccgtctacctccggctcgcctgtctgcagggcatcgttacccggcgtcctttggtaagcacgctctttacagttccagtgggccagagcaaccacttataaacgactctccttcatttgcgacagatcctccaactgatcaaccggccggggacctcgcaactgacggacggcgccaaggagacggcagccgatgccgccctcaacgaggacaacgccgacgagtggggcgagttcctccatctccccggcgagaagttccacgactttggcaagatccgcgaagagattgtccgcgacaccgagcgccacacgggcaagaatgccggttcgtagctcccgcactccacttggccgctcagcttcgagctgatagacgcccttcactctcgtcgctcaaggcatctcacctaacccgatcaacctgcggatctactcgcccaatgtcctgacgttgacgctcgtcgacctgcccggcctgacaaaggttcccgtcggcgaccagccgcgcgacatcgagaagcagatccgcgacatgcttctcaagttcatctcgaagcccaacgccgtcatccttgccgtcactgcggccaacaccgacctggccaactcggatgggctccagctcgcccggtcggtcgacccggagggcacgcggacgatcggcgtcttgaccaaggtcgaccttatgtgcgtctgatgggtcagaatcgcacggcgcacggggcgaacgactgatttcttctctctgctgctgccgccgccccctccctcagggaccagggcaccgacgtcgtcgacattctcgccgggcgcatcatcccgctccggctcggctacgtgcccgtcgtcaaccgcggccagcgtgatattgatcagaaaaaggccatcaacgccgcactcgagaacgagcgcgccttctttgagaaccacggctcgtacaagaacaaggcccagtactgtggcacgccctacctcgcccggaagctcaacacgctcctgatgcaccacatcaaggcgacgctgcccgacatcaagggccggatcgcctcgcagctccagcgctaccagcaggagctcgcctcactcggcggcgcaatgggcgagcagagcggcggcaacgtcgtgctctcggtcatcaccgagttctgctccgagttccggactgtcatcgacggcggcagcaacgacctctcggtcaacgagctctcgggcggcgcccgcatctcgtttgtctaccacgagctctttaacaatggcgtccgctcgatcgacccgtttgaccaggttaaggacggcgacatccggacgatcctctacaactcgtcgggctcgacgccgagcctctttgtcggcacggctgcgttcgaggtcattgtcaagcagcagattaagcggcttgaggagccttcgctcaagtgctgccagctcgtctatgacgagctcatccggatcctcggccagattctctcaaaggtccaggccttcaagcgctaccccgccctgaaggagcagttcaacgccgtcgtcattggcttttttcgcgaggccatgatcccgacaaccaagctcgtgtcagacatggtcaacatgcaggcctgctacgtcaacacgacccaccccgacttcctcaacggccacaaggcgatggcgctggtctctgaccggctcgcagcctcgcggccggccgagaaggcggccgacccgaaaaagatctcggcggcggccatcaacaataaccgcgaccttgaggtgacggagaagaaggacgagccgtcgttcttttcgacgttcttccctgcgggcgcgagggcggcccagccaaagaagaaggcgggtgtcagcgtcatggagtcgccgccgccagtcatccggccccaggcggccctctcggaccgcgagtcgatggagaccgaggtcattagtgcgtcgtctcgcggctgggcctctgtcgtcaccaatggtggatgctgacgctctctcctctgggcgacagagcttctcatccactcgtacttcaacattgtcaagcgcgagatgatcgacatggtccccaagtcgatcacgtacacgctcgtccagcaatcgaaggaccagctccagcgcgtcctgctcgagcaggtgcgtttcctcgtccttggccaagccacttgctcttatgctgccgagctccgactgaccttgcgcgttactgtccctcctctcagctctacaagcccgagacgctgagcgagctcatgaaggagagcgagtttgtcgtccagcgccgcaaggagtgcatcaagatgtgcgttgctcttcgttctgctttgctttgatgactatgctgaccctcgctctacgctcgcttgcttatctcgcagggtcgaggcgctgcagaaggccgagaacatcgtcgctggcgtctaaggagtggacgaaatgatagcggacgcagacggcggcttttgggcgccttcggcccgggcccaggcatcacccttgcccgtccatcggcgagtctgcctgagggtcggcgtagggcgggtctcgaagcgggacacagggcctactgggacgaggtcgtcagcagcagggtagcgcaccgcgaagcgctcgctcatctcatcagggccctctcttcattcgatcccctctgcccctctgcccaacctagatcacgctcgcccgaggaccctcacactcgcccctctgtctctccaccgccttcgttgctgactgtaccggatgatacccccgtttccacaaaatcccctgccggaaggccgcctcagccagggccacggcctccgaccgacgctcgcgctaaggctacatgaagatcgaggaaagcagagcgggaggagcgggcccacgaaatccgagagaaggatgacagggaggacgagaggtgtcggggttgagtgagatgacggtgggtcgaagcagaggaagatcggcggggccgaggcgagatacctggtcgctggagtgagaacgagagtcgccggggctcaatgtcgcaggccttgaaacgcctctgcgctcgatcaacagactgacggtggtgcgagtacacaagcacccggcggccgtccgggctggctccgggcaggcgctccttccctccctgccgcctgccgcctgccagaggaccgtgtgtggtacgcaatacggcgccctactttctctgccacgtatcggcgtacggcgtcgtcttcggtaggaccggctcgcggtcggccgcccagatgatgcgcgacgtcgactttgcctcagtctgcagaagaggataaagaggaggtcagtcgatttcatccggccttccatctccgtccagcagcttcagccggacgaagggcggggtgagggacgtacgacaggcttctttggcgaaattgcctcctcggccatcgctgcgcggcggtcgtcgacctcctgcttaagccgcggagagagggcctgtgcgcacaagaaaaggagtataaatcagcatcaggacggaccagaggtatactggacgagggtgaggtgagcgagaaaagaacaaggtgatgttcaatcgaccggctggccggtctcgcagcaccttttgagacggcatcgatgccggcgccatcccgtcggctgccatccctccccttcgcaggcagcccaatcgaccgtcttagccagagcagacctcccgtgccctctcccaggcgactgagaaacctccgcggcctgtgagagtcaacgatcgatcgatgctcgtctggccggagccgagccaggcaggacggggccgggcgtgtggcggcgagccatcgggagggagcactctgccgccgaagagaagaggcagagaagagaacagaggaggacgacgaggagacgcacgttgtagtattgctcctgggtcggcgtcgcccctagcagggagaggacgaggttgcgatcgagtagcgagcgtcgaatgagagcggacggagagaggcggtcagccgagcacgccgacgaggcgatcgcgcgccctgagagatcaatgagacggacaggtcatgacgccgtagccgagggcggtcactagcagcccgagcaagcgaggacggcgttcgtcaagcaaaggatgagaagtcagcttcagaggtagagtaacgagtggggcgagcacaagagcttctctgctcgccctttcaggcaagcaagcaaggcagccgacgtactgccaacgatgaccatcgagaactttccccactggaccttggccatgattgctagagggtttgtatgagagattggggatggggagaggcagatgaaggctgatggtcggagggcagctcaagcggcgctctcggccaccgccgggtcaggcagcagcggccagtcgcagacgatcgatcgcatgccacttttggccttccctctttttgcgaggttggtcagaggcagaattgggcagtagaagctctgactgactgcctccgtttttcaacactgctaaggaagctcgtacttgaggcgcatgtcgctgtcgctgctgctgctactgctgcgggccccgtcgtcgccacatacgctagctcacttcgcgtcgcgtcctccgtctctctcgcctgaccctcactcgctccgcctgattctccgagtccgctcgcgaccgaattcaggtgacaagtcagttatcacagcgaagacccacccgcgatatttgtccgcgctcgtgtcgctcgcgcagcccggcttcaaggcgacgcgctcaggattgactgaggccggcgggtttcttacttcgcgagcacgaggcggtgctgagctgtcgacgggccacccgagcagcggagacgacgagaagggcgagcacggtccatgagcatcgagctctgcgtgcgaggcacagtacgaaggagacagggccgagacgagggcccccgccagggctgagttgccagaggacgagcgacgtcccatgtcctgcgaggagtctaacagcgacattgagattccagccgggctgtcagtctacgacatcgacagaacagcagtcagaggggaactgcgagtggacgcacccgtcgccaaggcgtcttcggcgagagcatcgcaggcctcctgccagacaagcctacttttgtcgataagacggatccctgcgcgtcgcaggcggcgagccgagacgccacagagaccgacaagggcgttgccgggtttgggctcccggtcagacggaatcgtgaccagatagacctggacaatcatcagagacgggaatgccacccgaacgacatgagggtcgagcgccttgaaggctaccttccaaccaagaaaatgtagttgccgagcgtgccgagggccggaagcgattgcgacaggaacgagtccgtgtcaatgtcgcgtacgatgagctcgcgcaagctgaccaaaggagagaggacgtctgcaggcaagacgttcatctcgcctgtaaggtccaggtcgagcaggcggaggtttacgaatgctttcatgtcggcgagaaggcggacgtcaaagtccgtgacctcgggcgaccggagtgtctgaggatcgactatcgtagagagcgggacaaatgcgtcggccgcgtcgaggtccgacgacttccaaacaatggccaggcttgaaaggcgcagaggggagggatgaatatctgatgctggcagatgaccggtgaaccaaagagtcgaaacgccgacgaagttggggaaaaggcgtagcgagcggaggaagcgggcgacgtctccgctgcgcccgttccagcagtcgaggcggtgaacgtgccgagcgagacttggatgagcctccaacatggcaggcggatgagaccacctccgctgaggcgcttgaacagcaggccttgagcctcctcctagcgagatttgatcgcaagacttcaggtcagcgctgacacgtccggacggcaggacaggagacgcactcgccgggccggagagacgaggctgagcgtcgacagcgtcgacttccacatgcgcggccaccagcctatgaggtccgacgctgcctcccgaatcactagcagctggatctcgagcggcagcttgggctgctggcgggcgtgctgcagacgagacgagccagaggggggccgggcgtcagctcagctgccggctggccagctcggatgcgcgacagcagacggcacgcacgacacggagcgagcggcgcatgctgacgagcaattggggcgagcttggagctgtgtggaagcgaagggcggacgagaagtgaggaactaggtcgtggtcaggaggaaagggcaggcaggcgcgtcgggcgaggacaaggcgacggccgctgtctgtgctgcgcgccgctcggccctcccctttcaccagtgcctttgcgcacgcaggccggcaagaatcctcatcggcagcaaagagcgatggacagagcgggcagcatccgaaatcaacaggagagacgcgcgcgcgcgcaacaagcggggacagattagggctaggtggaagctaaggacaggtagagcgaggaaccgaacggcggtgaaatggagacggcgaggagcgacgggggtgcgacgtggtgtatgtggctggcgcgcccgccgttccggagacttaagggtgagggtgtgaatgatgcgaagatgcgagcgagggcgtagggccggagaagagccggggtctaggtgggtcgagcaagcgaggaaagcaaatggacaggcgggcgggcggggtcgtgacatcgtgacggggcggccccctctgatgtgacgccggcccccctttcctaccccattttatgacccctcaacgacccgaaccacaaaccgaccgcttcagtcttgcgagcgccgtacaaagagtctgtccgggctcgtttagcgagggaaggagagacaaggagaccgagctgttcatctgcctcaggtcactcgtttgcatgccgctgctctcactcatgaaagcccttcgccctcggtcaagcatgtttttgctcggcttgggcactcactcgtaatccagcctggcggacgaacgcatcgcgacccacgccgctgctgcgcctgcgccgtggcggcagaggttggtcgaagctctcctcctcctcccttcacaaccttccgcctgagccccattgcagacctcaaaccgctctcaacttccgtcaggccgttctgatggagaacttcctgcactcttacgtgccctcagccgaacagctgagggccgtcgctcccggggacctcagcatcgatctgccaaagctcatcgccaacctgtcgaccccggcccacgcgctgctgccgacgatacctttgaggctcgccctacacggcctgcgggtcgccgtagcctggcggcagatcgtccaagcccgcggcacagagcgcgatgcgagcggcctccaggggctctttggcttcctcgtcctcgctcgtgcgtccctcctttaccttcctgctcgctagcttcgttgcgtaccctcaactgacgtacccccacctctcaagtcggcggctcgaccatctcccaggcgcttctctctgctccgccgtcgtggctgagtaattcggcggtcctgccgacgtttaccgccatctactacggctcggcgccactgctgtcgatcatcctaccctggacgccaaccttcctgctcgatgtagccttttccggcctcgacgcgatcaatcggacggtcacagcgatggatgtcgtcgcttatctcgcaacacagcccgaggccggcctccagacgtcatggatcggcgccgccgtgctcggcgggatcgcttgctcgggcggcggcatcctctgtggcgcgctcgggctttgggacaaggactggcggcttcagacgccggcagtcctccagtcctccgcctcgctcggagcgtacgcgctcaagacgctcgacttctggtcgggtgctcttgtggccgtcgcatacgggacggcgctcgacctgccggctttcggcccgctccggtctttcctgctcgccaactttagccggccagcctcgccctgggcagcattcacgcaggctctgggcgtcggctcgaagcggacaatgagcgtcgaggagtcccagacggcgtgcactgtgctcctctttacgcttctgctcggccgggtcgtcgtcgtctggacgacggctttaaccagcgccctctttgccggcaaagcgcaggccgtagccacgaatgccggcaagctcggcagtggcacgcaggcgtcagggtccgaaaagatctcggcgtcgctgactgccagtcagacgccggcgacgccctcgggcaaggcgaagcggcgcaagggcaagggcggctactagagatattagagacaatcggagcgacatcgatagaaaaagcatggtcttacatctgctcggctgacaatctcctgagatccttcggccggcagtcgatgggcgagggcgagagagcaggcgaggcgtcatgggacgacggaggcgcagcagcggcagagcacttggcgatcccatcgcttcctccctcagcgtctagacacgaaggcctgagcgtcgaacctggtcgccctgctgtctgccctagaagatgagctccttgccatggataccgagacgttgcagcggctggtcttctcggcgtggctttcgcccgcctgctgctgctgccgtctccctccgagctccgaagcgctcgaagctccgtcgccacccccgctcgaccctcacaccttcgatctctgctcttccatctcttcaccctcatattcagacgcctctacgtgagcgcttcgctctcaacacaatccctgtccgctaccgccggtcgccgctgtcgagtatcccttctcactcgagcccaggcttcccgatggacttcgcgagcgccgacggcgagccgggcccctcgtcgcgctactccgccagggccaatccgttctacactcgaccagccgacgacaacgaggctgaggccggagcgagcgagcccctttttggaacgagttctgacgagcaggacacgctcaagcaggccgagactgacagcctttagtgagctcggcagttgacgccctcgactccgagaggagctgaccttcgcccgcccttacgactccagctcgctcctcaacgtgccgaaggatgcgaaggtggagcagatcacctcgcactaccgcgccttcgtcgtcctctaccacccggacaagcagcgctcgcccgagaaccgcgccgcagcggagacgacgttccggcgcatccagaaggcctatgaaggtccggccccttttggctcgccctctgctacttccgttcagaggttgacttggcgactctcttcccttctctagtcttgacggacccgcaacgacgggcgatttacgacgcgctcggtgaggagggcctgtcgtcgggcctcgaggtcggccagaagctcaagacgccagaggaggtgcgtcgcccgctgcagcttgctgtcgctcctgacccttgctgactcgaccttgggaccgtgagaagatgcgagccgagtacactcgccaggcggcagagaagaaggcgcttcaggtccaacggcttgtcaactcgaagggctcggtctcgctctcggtcgacgcccaggcgatcctcgctccctcggccgccttctttggcccgcgcggcccgcaggacgactcatggccgacccggctgcgctttgttcagactaaggggctcgcccttgtccaaagctggcaggctccgctcggggacgcgacaatgctcgaggtgacgggcacaatgtcgcagcgcctcggccagcgtcgggcagcgtcaaagcttggcggcaacctcatcggcacggttcgcagtcagtggacgcccaagatgtatctcgaggtgggaaatcttctctctgcgtcttgcgcatatagtgcaagtaactcggctgaccccgcgtgctcctggcccggttgttaggtgagctcatcgcttctcgcgccgcaggtcgtcgcgacgcgcgccatctacgaggtcgacgaggagacttccctcgagttttcgacacgcagcatggcgctccttgccctgccgacggccgacgtgacccttcatcggctgctgtcgccgaccctcaagtcgtggacgacgcttcactctggctcgcttgacggctcggacaatgatctctcgtcgctcaccattggcgcgaccaacctcatcgagccgggtgcgcccgagggcggctggactggcgagctcgccgtcgggccgggcgatgcgactgtcagcctcgactggggccggaccgtctgggccggctgggacgtcaaggttggcggctcaattggcttcaacggcgccaaaggtttcctgacatgggcgcgcaaggtgacggagctcatcaagctgacgctcgcggtcgagggtaggcgccgccttccttcaagatcaaccctggaagttcgccactgacttgcgtcccactgcgctcttcgcagccgaggtcgcgaccggcctgacgctcaaaattcggttctaccggctcggccagagcatcgcgatccctatcacactcgtccgcaagctcgactacctgacggtcggcgtcgcggccctcgtgccgtgcgtcgtcattggcacgctacagcacgcctacctcggtccacggaggcgacgcgtcgcagctcggtcagtcccttctcgcgccctctctcttcgccagaggtcgactgacgatctcctgccgacgctgcaggcgctggcgcgagcttcaagaggagaacaaggaggttctcgatcagctccggcaggaggccgaggatacggttcgcatgcttcagccgacggtcgaccggcgcaaagccgaggagatcaagacggacggtgagtcccgcaggcaatctgcaacatgtcccaaggagtcctgctgacccccattttcgcaggcctcgtcatcctctcggcgacctatggcaatctcaagtcgttctcgtcggccggcctcggcaacgctcaggacgatcccaccgggacggacagcagcagcaagcggagacccgacttcatcgacgtcgcggtcgcactccaggcgctcgtggccgactcgcagctcgtcatcccgcccggccggtcgaaagctggcctgctcggcttctttgacccttgccttggccggcgaaaggcgctccgtgtgcgctacctgttccgcggccggctgcacgagtgcaccgtaggcgacaccgacggcctgctcgcgccgatccggcagcacgcgattgaatgaagccctacactgggcgagagactcgagttgtgaacggttcctgcaagcctggcgcgtccgagtctggcgtctgtgcgtcgcaggcgggcgggcggtgccttccctcttccagccagcgcgcaagccgacgttttcatcgccctcgccgcctcttcccaacctcctcacctcatccaaatcatcacatctctcgactatggcccgctctgcgcccaagtcagctccggcgaccggccgtccggccgtcagtcatcggtccatctttgacgcgctcaagattgagggcgaggactcgtcgtccgaatcggaggtcgaggtcgagcccaccccggcggtgtcgaagaaggcggccaagcagcagcagcggcagcagcagcagcaggcatcggttgacgagcaggcctcggctgtcgtcgactcggtcgtcgaagccacccaggacgcggtcgagactgtcaaggagacggtggtcccgctcacccggcgggcagagaagaagctcgctcggcaggccgccctcaaggccgccgccctgacgggctccgatgcgccggccgacgacgcctcgccctcgtcgtcgtcgtcatcggacgccggtggccgctcgtcgccgccgagcaagatcgacatcaacgtcgccaaggactcgcacctcgacccgcccgtcgccgcgctcgcggcctcgacgcccgaggtcgaggcgctcaacgaaatgggcgtcgagaacgacggctcgggtcctgccgccggcgccgagccgacggccgagagcaaggacatcaccggccaggaccaggtggcggtcaaggaggcccgcgaggccaagattgaccacggccagctcgacgagcagcgcccggcggcggcgacctcgaagcagcagcgggcgtcggcggcaaccaacggaaagggcggcctcgcccacccattctcgccatccaatctgccctcgctcccgcacctgcccgaccctaagaagtcggtcccgtcgaagcgcggcgcggccgccgactttgccggttcggagaagaaggagaagaaggtcgtccgctttgacggcaccgaggtcgccgacgcgcagtcgaccgccggcgtgagcagggccgagaagatccaggcgaaggccgagggtctgaccgaggctgagctcgccaagcagaagcggatgaaggacgctggcacgcggacggcgagcacttttgccatgatcgccggcttctttggtccgtcgcgcgcgcaccgcttcggcccacctcgtcgctgatgccctcttctccgtttacaggcttcctcttcctcggccacccctacatgatcgtcctcatccaaatttgctcgaccctcgtctacaaggaggtaacggcgctctttggtctctcggacgctggtggccgcaagggcgccgtcggcgaccgcaagacgaccgacggctcgcccggcgaccgctggtccaagacgctcaactggtccgtcgctagcttcctgcccctcattgtcgtcttctctctgtgctgaccctcgtcgacccgccaggtacttctttgtcgtcaccaactacttcctctatggcgagtcgatcatctactacttcaagcacatcgtctttatcgacgcctacttttccgtctttgcccgcaaccaccgcttcatcagctttatgctctacgtcattggtgcgtggcgtgtcccgcccttgtttcgagcaaagaaccgcacgctgaccccgccccctctcgcgctgaataggcttcgtcgccttcgtcatgaacctccagaagccctacctcgcccagcagtttgccctcttctgctgggtccacatgacgcttctcgtggtcgttgtctcgagccacttcatcatgaacaacattctcgaggtcggtccttcttcgtccgtcgcaagaggccgtgaactgacgctcttcaaacccccagggcatgatctggttcttcctccctgcttcgctcgtcatctgcaacgacatctgggcctacatctgcggcatgacgtttggcaagacgcccctcatcaagctctcgcccaaaaagacagtcgaaggctttgtcggcgcgtttgtctgcaccgtcgtcttctcgatctttgtgcgtagttgctctcttacctactcctttagcgattactcgcctgattaactcacctcacctcacacacgcagtggtcgagctggctgatgcgctacgactacatgatctgcccggctaagtcgctcggcatctcggcctggtccggcttgacgtgcgaccctaacccggttttcaagtggaccgaggccgtcgttcctgctccggtcaacgacgccatccgctccgccgtcggattctcgattccggccattccgtacgcgcccttccagctgcacgccgttgtgatggccggtttcgcttcgctctttgcgccgttcggcggtttcttcgcgagcggcttcaagcgagctttcaacatcaagggttagcatctgctacctttctgatcgctgctcgttctcctgctgacgcaatttggccgtcaagactttggctactcgatccccgggcacggaggagtgaccgaccgcatggattgccagcgagttcgatttttttgggtcattttcatgccacagcaagtctgacgcccctttcctgccctcccaggttcctcatgggcctctttgcctacgtctactactcgtcgctcatccggaccaacattgcgacgccgtcgtcggtcctccagacgatcgcgggtatgacggccgcgcagcaggtcgagattgcccgcagcctcggcgccttcctcgccaagaagggcctcagcgcttaacaacgaacgtagtcgctctctcgcatgctcgaacgagctggtctgaaaaattcgctgaagaagaccggaaggcggcgcggccatggtcggtggcggtcagggtccggccggtttcagccccttcatgcagcctccctcctctcccttcatacctccccccctcttagacatgacgctatgaaagcgagatcccctgcaaccgtgcctgcccgatagctgaatatgaataagggcggcggtagagtgctgggcagccttacagagcaacagacgctgacgctcgcccgtcccgaggcgaccgcgtccgcacaaatcgcgacgccctgaaaggtccttcgactctgacctcttgaaccccgtcaaggtttctgcgcgcgaatggcggttcgagaactgaggcaaagaaccggaggacgggggcgggggcggatctcgagcggtgtggtacctgaggaggtgggctgcggtcgctagcaaaggtggggttggacagacggcgagaagaaagatgatgcgcgggggctcggtggacctgctggtcgggtccgacgaacagcgtgcgctaagagcaggaggataggagtgggaggccgcgcgaccgcctcgctcaggcctggccgcaaggcaccagccgtgcagctgagcaaaaagccagagcgctcttagatctccactgccgggtcgtcgttcgtgatcagcctgatacagagcaggggttagcgtccatcctctcgaagggaccgcgcaacggtgacacgcacgagaactccttgatgaggacgcactcgccgcccttctcgaggtcgagcgagtaggcgtgaaagaggccggtctccgagatgacaaacacctgcgggctagacctgcgaacgcagtggcaatgaggcgtctcagctacgaatgggggcggtcagagagggaagagaaggcaggctacgaacggactgagtgcgacaacacagcggacgccgcccgagcggagccggacgtgcgcgaaatcacgctcgggcgtccaaaggtcgcggacgccggtcgggagatagctgccgacgtagctgcctgcgaggccaaaggttttacgccggagcgaggaggtcggtgagcgggaagagccggcggtcgatgacgtcggctggggcgatggcccgccgttgccgttgctcgtcgtcgagtcgaacgagctcgtcgaagcgtggctcgcgagcagcggcggcccaccaccaccgccattgctaccgctgctgacaggatggctgccggtcggcgggagcttgtagatgtgaatcgtgtccgagtcgctcgcgacggcgagaagcgagcttgcgaggttaaaattgaggctgcagacccgggcggggtaggtccctcgcctgaactgggcaaccttctctgccccgggcgcctgccagacgcggatgacagttcctgtctcgctcgcagtcgcgaggagcgtcccgtcgctgttgagcgcgaggtgggcgagcggcgccttgtgcgcctggatgacgttgacggtcgtcagggtgagcgcgtcgaagaggacgacatcgcctggctgactggccgagccggagccggccgatgacggtggcaagcctggcgagctcgaagtgccactgccgccagatgcgccggccgcagcggctgaagacggcggcggcgggagtggcgccgggtaggcgatgatcgagttctcggacgacgaggcgagggcgcagatcgctggaggagtcgaggtgtcgctgggtcagcctctgataccctatcgagagcaaaacgacagcgaacgaacgcaccgttcgggttggggctcgtctcgatcgtgtgaaggagcttcatcgtgctgacgtcgtagatgtaaatctcctcctcaaggacgacgaccatccgcttgcggttgagcttgacggcgagaacgctcgtcgggaagaggagctcgcagatggtcgattggcgctatcaagtgcgacgattgagtgtgagccctgagtctcgactcttcgaggagcggcacgcgacgcacctttgtgttgacgatctgcagcctgcgagggctctccctcgcctgactgcccggcgccggccccgagcccgagcccgatggcctgccagcaccgtccgctccaggtgcgccgacgagcgcgacgagcgacgtgcagaagagcatctcgacgagcccggttgggccctcgttcttggcgtggacgcggccgaagggctcgcagttgacgatcgcgtagcctttccgggtgccgacggacagacaactgcggacggttaccgaaatgaaaagcaggtcggccgacgcggatggcggcgaggcagaagaaggaggcagggagggcgtcggtcagctgatgcgagccgaggtgtagggagcatctacggcagggccggaagcgagcgacgaacgagaagtcttggttaaaggccgcaaatctgagcaggcggggacagtatcatggtgtcagctgtcttgtcgtctctgaaggaggtcaaccgggatgaggagggtcgattgaaggaggaacgtcgcagggaggtcgggtcccgcccgggtgcagctaaggcagccgctcctggacgacatccagctcgccgaccgtcgctcatgcagccgagctatatatccaaagtcgaacaacctctcgtgccaggtgggccgtacgctgagcagagggatacgggccgctgatgtcggagcggagaaagcaagaggagggctcgacgcacagcaggtccgggtggcggacgacggccgggcccatggttcgtttcgagagcgcgcgtgtggttgatgtgcgagagagatggcgtccggtagctaggacgggctgtcagtatggtatctctgggcagtggcacagaggtcagggtcggaggaagcgagtgggcgggagatgggcccgcctgcgttggctcgccctccccgcgcggtgcccaagtgagggtcgcgcagcagcagcagcagagccggtccttcgtctcatggctgaagtctgctgtcgtctttactgagcatctgcaggcctcgccgaagatagccagtgagctgccggccgtggtcgactatgtagagggcgactgcgaggagcgaaggcagtgacaaccggcccggtcgactttgcagcctctctcacggtggcctccccaaaggagcaacgacgactggcctggcagtgtctctacgaagatgctcttcgttgcctggcagaggacgtctgcgaaggagtgctgcttgggccggacccgttttaattacccggccggcgactgctggctcgtctttgtgtttctggcagaggcgcgcgccgacgcgttcccttctgctcggggtgggccgactctttctctcccttctcagccctcccactcttcctccctccccccctcctccccctcgacggccgacggcagccaagcggcctcgccgctcaaagcagccctgacgaccgcggccaacgcagcgcactcgctcgccgtcagcgcaagcacgactgttggcggtctccttgcgccgtcaacgccgacaaaggcgaaggcggcgccggggacgccggccacgccggtggttgaggttaagccgccgccggctgagggcggggaggagagcgagcagaaggtgacgccgtgggatgtgagcgggagcgtcggggccgatggcgtcgcggttggaatgtacgctcttctctccttcggggctcgcttccttccctcatcactcctcgtcctcccgtactcttcgcccatactccgctcttctcgctcttcccggagtctcagcccagctgacaccccaacccctcccttcccagcgactaccaaaagctcatccgtcaattcggcacctcgcccatctcccctgccctcatcgagcgcttcgagcgcctgaccggccaccgtgcacaccacctcctccggcgcgggacgttcttctcgcacagggacctcgaccggatcctcgaccggttcgagaagggccaggcgttctatctgtatactggacggggaccgtcgagtgggtcgatgcacctgtttgttcctcctttcgtcctgccgcccctccgccagacgagcgctgactcctcttcctcctctctgcttggctagcgggcacatggtgcccttcacgtttaccgcgtggcttcagaaggtttttggcgtcccgctcgtcatccagctgacgggttcgtgatcccttcccctccctcctgcctcacccgcccggctaacaccccctcccatcccacgcgcagacgacgagaagttcctcttccagaaggagggcaagcccctgacgctcgccgacgcccaccgctttgcgtttgagaatgctaaagacatcatcgcctgcggctttgacgccgagcggaccttcatcttcagcaacctcgactacgtcgggtgcgtcccgccttagccggcttcagtctgagcctgcggccgtcgctaacttctggcgccggcttcgttccggctcaccagtggcccgttttactggaacattgtccgcatcgccaagcagctcacctacacccagtccaaggcgacctttggctttgtcgagtcggacaacattgggaagagccacttcccggcgattcaggccgcgccgagcttctcatcgagcttcccgcagatctttggcgagcggacggacgtcccgtgcttaattccgtgtgccatcgaccaggacccggtcagtctgcgctgcctgcttgcctgcctgccttccttcgactttcctccacggctgacatctccgccccttcgcgctccacccgccggcagtacttccgcacgacgcgtgacattgcgcccaagctcaagttccctaagccggcgcttcttcacgccaagtttatcccggccctccagggcgcgcacactaaaatgtcggcctcggacccaaacacgacgatctacatgacggacgcggcgggcgtcatcaagaacaagatcaacaagcatgcgttctcgggcggaggggggaatgtgcgtcctccgttcctggctcgaaggtttcgcacaagggctgtgaagactgacgcccccctcactcccttcttgtgtcgcagggctcggccgaggagcagcgcaagttcggcggcaaccccgacgtcgacatttcgttccagtacctcggctttttcgaagaggacgacgccctgctcgcgcggctcgcggccgactaccgggctggcacgcttctctctggcgagctcaagaagctctgcatcgccaagctccaggagtttgtcgtcggcttccaggagcggaggaaggaggtgacggacgaggtgacgaggaagttcatggacaaggagcgccggatcgcgccggagccgaccaacaaggtcgtcgtccaggcggatggcgtcgcgatcgccgcggcgtcggttgcgtctgcctaacttagaatccttggtgctctttcctttcctcccctcttgggtcttagaatgacggttcttagagattcgctcgctgctcgcgactcgcgtgcctagactcagtcataggaatcgccccgcgtacccctccgctgccatctccctcgagctcgtcctccagcagcccgctaggcgctctcgagccacgatcggacaaatgcaatctcctctgcgtggatcttgcggatcgcggccggctcgcgcgtgggatctgcgaggccgttttcgtcccagtggtgcactgccgagggaggaagggggaggaaaagagagtgaggacggcgagttagcgggtcgagtgccaacttaatgttttgagagggggcggaaagacgcaccgccgccggggatgagcttcgatggacggagaagcgtgtcaacccgcttgagcgccttgtccgacccgggtgtcgctggcctccacgggtccgctaacccatccgcaaacgttcgtccgtcagcatctgcgcggaatcaagagggggtagtaggaatggggacagacagtcgccgtcgataaaggcaagccggtcggcggcgattgcgaagtcgccgagcgagttgacgaccgagacatttggccagcgggggacctcaaagtgctcgcctttcgggaagccctacgtcattgccggtcattcgcagggtcagcaaggacgatgagaaggggcgattgcaggcaaaggggacggcgcgaacctgctggcagatcttagacgtatagtcgagcgtcaggtgcttcgacacgatccgcgggccctcgagcggggcgccctggaagtagccccactcggtgcagacctggaagagcctgcgagcggagcgggcaagccgcagtcagccaggctcaagggtcgatgcatgctttgggatgagcgagggacgacggaccaggctcgccaggactgcttgagcgagacattctggaacttggcgtcatcgtacgtcctgatgaggtggccaggggcgtcagcagccctctggcgatggacgatgatcgcacccttcgacttacgagaagcactaccaggtcgagtcgcacggcacaggaacgtcagctagccctcctctgagacgctaaacgaggcccgaaagacgactgaccttctcgaccgccccttgcttctcccagccagggcactttttgacctcgtgctcgacgatccagcgcgcatagttgtcgacgatctcacgcttccgcgcctcatcgtcaggcttgacgtgcccgtgggccgaggccgtcagggcgtcgcagaagttttcgaactgcaggcaggagggatgagtgagggtgccggttgagaagctgaggagcagcgaagggtgcgggaacatcacagacctggactgtggagaccttggggtcccagttacgcgcctgccacgcgccgagcgggttcgagagtacgccggcaaagctgtcgaaacgggggaacgcatgagtcttgagccgctcgtcagcaagagccgcaacaggaggtgacgcactcgtcgttctcgagctcggcgaggccgaaaaggtgcttgacggcctttgcggccttgccggtcggctcctcgagatgctcgtcgatgacgaggatggccgtctggaggtcggccatctgtcgagcgaggacggaggaggggctggcgtgtgttagcggtttgcgggcggggcaggcaagtgacgacgagaggggacggacgcagtcccgcggtgcccattggcggatcgcatccatgtagtctgtagcggcgtgcaaagagttagccgagagccaggcgcaagatcgaggacaacgggtcgcgcaccggtgtagaagatctcggcatgcgtgacggccgacgacgcgatcgcgccgtggacaagctccgagtacaagacactaaaaagagcacagtcagtcggcaccttctcgatggctacgacgacgactgggcgcaccgcatgtgagctgcccgggcaccggcgtatgagccgccgatgtaaatccatttcgccccgccctctcgcccgccgcggacgtcgtgcccgaggcccttgatagcgaggtgccggataaagtcggccgagtcctcaagcgcctcggcattgttaaggaagcggagcgagtcggtcgagaggttgccgtttggccagtcagggaacgattcgccatagtagcggtgctcgaggatgacggcgaggccggcaaactcgtgcgcgagccgcttggcgatgcccgtgtcgaggaagggcagccggttcgcacccgacgtctcgccgccgtcaatcacaaagacgggcccgccgggcttgtagtcgcttgcgtcgaaccagtagcgctggcagaaggtggcgccggcgaccgaggcgtcggcaaagtgcgagacgggctgacggaagcagtgggcgtcgtgcgtcgacgagggcttgaagggaagctgagagctgtcgagggcgaaggggtcagccgagggcagtagcagtagcttcagacgaggcagagcgaccgacccatctgcctggccgacaaaggcgccgtcgggcgggacgtcggccccgtgctcgagcaggttgatgaaggcggcgacctggtggggcatgccgacgccgaagccatcgagcgcaagggcagagggcgcgagtgcgactgctgccgccgcaagggcaactgggaggatcatctgagtctgagtgggttgtggtttgggacaggcgaggaggaggaggagccatgctggccttcagcccttcatcgctcaaagggtcgggcgaagccgaaaggaagcgatcgagacggggccgggcgagcgacatcggcagcgacccttcccctcctgttcaggtaagtcgccaggtgtaaggccatcagcaacgcaggagaagcgcatacaatcccttggaaggatgactggctttggatcgagtgaggcaagcaaggggagagaaaggcaagcccgaccggctgcgctttcgtccctcgagtgttcgagctcgtcccagctacctgacgcacgacctcgacctcgacccgcacccttcgcaacgcctctttcccctgcgcagacagccgctgtctggtctctccaacctggcttgagccgagcgtcacccctcgagacgacctagctggcgccacgatggacggtccccgtcgggcgacgctcggccagcaacgcgagcagcagcccgcccagcagtcgatccctggcctgctcgtcttcatcatcttcatcttctttatcaactcgtcgacaacgtccctcgcgggatctgatccgggcgacattccgtttgctggtgagttgcggcgccggagaagtcagaatgaggttacaagcccccgttgctcactcactcgccctccgcctcagatggctcgaggacgacgccgaatggcagcacgccgaacaggacgtttgtccgaagccgctatcaagagtacgaggcttttctagccggcaatgcatcgagttggttgccggtacgtccttgctccatctgcgccttccagccgaggcccccctcgctgaccatctcgccttcatcttgaccgtccctcgccgtgccagcccgaaccctcaccgcaagccctattcgccacccttatgcctcccacgaacgagccggccgtcgaacttcctttccgcttcgctcagaacatcaccggttttgttcgacgcgagtcggccgtggcgttcaacctctcgatgccggtggcaggctcgacgtcgccggcggccagtcaccttcgatcgtacctcgaccgactcgacctctccagccctctcctgcatccgctcgacacctcggctctaacgaacctgacctcgccagatgctagcagcgccgagcaagcgaccgctggccaaccgggccggaacgagacgctcgcccgcgagctacgcggctccttcccttggctcgcgacgaccgccctcccgccctcgatctggaccgaccagacggtggcgccgccagcgatcgactctctgagcgtcccgccgaggacgcacagtctcgctctgacgctccgcgaaggcctctggggtcacgcctacaatcatcccgagcgagagcgccgttcggcgacgcagccgctgcccctgaagcttgatgaagacggccatcgatggacgaatgtcaagggctcgctcgacatgacgacggaagggagcgatggcgacgtccagcagtcgtggacggttcagggctgtcatgacaggcagaacgggacactgtacctgcttggctctgtcgagtgcgtgcctcttcttccagcccgagccactgaatcctgctcatgtgctactcttccttccttgacagagacggcgaggtcgacattcgcgacctgccggccttcttcccgccgggtagcgtcgagcacgccgacatcttgcgctttgtccggcgcgaactggccgaagaggaggagcggcgggtgcgcgagggccgatcagagtctggcacaaggcgaccgacgacggacgaccgtcagtccttcgtacattgcgagagtgctcgagctctgacgttgcttcctttgaccagtggccatcatgccggctcggacgacctgcccgcttcgcctgatggtccagctcgcgcccctcgactcctctctgaccgccgacgctcttcgcctcgccgagaacgagctccggcatccaaccggcctgccgacggaagtgatccgcgtccacgtcgcaggcggcgtctggtcgtcgtgggagtgcggcgtcgccggcctgatcgagggcaagggcgagattctgcgggccgagagcttctggcggggctcagtcgactgtcggttccttctaaactgtctgctggaaagagatcggcagcagaagctgactggaagcctcctttgccttgcatttagacgcgttcggctcgctgctcagtcaggcgcgtctcgattcagcgtgacaggcgtgaccggatgcttgccccgctgactcgcatgccctccctcgacagacgatcatcctcgcgctcatggtctggcagatggagcacgctcgagcgccggcccagctggccaagattgcgatgggcacggtcagcatgcaatgcgccctcgacggcgccatcttcatcggcgtgcgtcgccgtcgtccactccagctgccggcgttcgacggctgacgccgccctcttcccccctattgcagaatgtcatggtcggcatcatcgtcggccgacggacgctcgccctgatggggacagcctttctcgccatgctctcgtgcgccatgtttggcccgcgctggctcgtgacgatcaagctcacgcaagagagcgagcaggcgacgtctcggccaaccactgcgcggctgccgctaccagtcatgcctccccgcacgccgctcacatcgtccgcgccgtcggcgccgccgccgaggagaagagacattgagctggtcgtcccaccgacgccgccgccgacgctggtagccccgagcccgacgattgaagcgacagctcctgtacccgtggtggcagcaaccagcgactccctccccctgccggcatctacgccggaagctccgccgccagccgtcatgcccggcacgctcccccgtctcgccatgggacctccacagcaagaggcgccctctcgtgcgtactctctccccttcatcgacgctgcgagtggtcgactgacgagcaaacgggggccttgcctagcaatcgtcctcgccctctttgtctttctgctcctcctgcagacgaacctcctcccgctcctcttcccggccattgtttttggctgccactttttctggctgccccagattgtccgcaacgcctcgcgcggcgtcagaggcgccctccgctggcgttacgtcctcgggacgacggccgcccggctctggtacgccacctactttggcagcggctggatccgcgacaacgtcctctttctcgagcacagcagtgcgtttccttcctgccctccttctgcgctgccgatgttgaactctgtgtcagcgcctcccttgctgcagagtggttcacggccatcgtcatcgcccaggttggccagctcgtcatccttgccctccaggacctggtctcgccgacctttttcctgccggcccgcttcgccccgccgccgccgtacaactaccacccggccctccccgccggccgagcctctgccggcgcgagcagcgagaaggacgtcgagcgcgatgcggcggacggaagcggcggctgggaccgaggcgactgtgccatctgcatggacccgctcctggcgcccgtcgacgacggcggggcggacggccatgcagctgggggcggcggcggattgggcgcagcgcttggcggcgtcggagggagcgtcgttgctggcctccggggtcgggagctcgcccttgcgccgtgtcaccatgtctttgtgagtgcgagggaatggccgggggttcgaacgatcgactaaccgcgttgttcgctccttcgcactcgcgcgcacgtttagcacacagcctgcctcgaaccggtacgtcgacccgtttgcctttcacctgatccgtccatctcgctgactcgtctcgaccgcgcccgcgtagtggatggctatccgctcagtctgccctcaatgccgccgaccgctgccgcccatgtcttgatgttctctcgttcggcctcacagagcggtccatcgtacaaggcagaacaacacgagctacagacaagagagacaattgcgaaagggagatgccggggggggggggctctaggaccgcttggcctttttggccttgggcgcctcgtcctgctcgttcgacgcgtcatcgtcgtcgtcctcctcgtcatcgtcgtcgtcggcggcctcgtcatcctgctcatccgcagcgccgtcgccctcctcagcctcctcagcgtcgtcgtcgtcgccgtcgtcggagccgtcattctcctcgccgtcgttgtcgtcgtcgtccttctcctcgctgtcctcgtccttctcatcggcgtcgtcgtcgccggatgcctcatcatccttcttgtcggccgccttgcgcttggctggcgttgtcttggtcttctggccgctgccgctgccgccgccgccgttgcgcttcttgagcgcgtcgtgcccccttgaaccccggccggcaccgcgcgagccgcacgtcgtcagcactgtcaaaatccgcgaaggaggctgccacaagaaaagcgaacgggacgcaccagttcttgagcgacctgtagctctttgtctcctgcagctcctcatcgctcttgcccgcgttcgccttctcctcctgcgccagatgccgcttacagtacgcgacgaccctcctggcatgctcgatatcctcgccttcgtccgggagcgcgtcggccccgcctgagcggaggatcgagacgatgtgccggccagatgcgtggcctactgcttcgccggaggaggacgggtggacggaggaggagggattctgccagccggcggattgggaggcgtcggctgcggggcgagggggggccgaggagggaggagggtcagccttgggtccgacgacgagcttggcgcggtcgacagtcggcatcgccgcgagacgccgctgctctaagcggcggcttcgggcgaaggcaagcgagggaggaagaggaagggactgactcttgagccattcctcgagctcgtcagccgtcatgttgacgagctggccgcgatccaacccatcgaccgagtcgaacgaacggagctcagtcagctgcccgttccaacacctctgctggctggcgagaaacgcaagcgactgacctccttgaagtcagcgaccgtctcctcctttgatttcgtcatgcttgctagattgtatggctgggataggtaaggtaagagtgaggtagggcgtcggaggggagctgaaccgtcaaaagggcgacccccatctcatctccacccgcttcgacgtcacctcttcccgggccggcgcgagatcgatcggccttagacctgaaacggtcaggtcgacagcccctttcgcatattgcgcccctgcctccgtgaaggtcagtcgatgacctgctttacgcccggggcctgctctcgctgagaggcctaccacgctcgagctttcatccgattatcctctttcgtgctcggagtgtcagattgaccgacgtccgagcgcgcgggagaggggaaaggtgcaatggaggagcggttcgcgagctgagcggctccctcctcgagcttatctctctgcgcattcgcaggatgagcaaaagaaagagaggccgaaagcttttggaaagagtccagcccagagaaaggatagcgtttgcgatatctacaatgcgaagcgagaggggcagctcggagcgacaggccgcttcccccccccgctctactccctcgcccgaacctcgccctcccagctcccaatcttagcccgcgtcgtcgaaaacggcttgtaagccgcccgagtcgccgtcaggttgtccctgtgaggcgtgagccactttggcgtcgattggcggaggatggcgtcttggggcgggggggggccgcggatgtggttgagccaggaggggtggcgggctgaggccaaagggcggtggcgcccctgtcgagaaatgtttcaaggggctcgcccgtccttgagcgaaagcgaaggacagggaccgcgcgatgccgttcaggtcaagcgctcgagcttcttactcgcgtcgtcaagatgcgccgcgtacggactcatcactgtcgtaagcctgcagcgaggagagagtcgccacagacttctcacaggggaaggagcctcacgagcctcgctccagccctccgccgctagtagctgaaccaatcgccaacctcccatgcggcctccgagtgagtgagccgtaggacagtgctcgaaggcgccagcataagctgtgcgagcggataggcacggcagctgagcttttggcgaggaacgcatttcatcgacgatcgcctgtcgagtccaggcacgaacggcacgaaggaggcacgtcagactatcaccctttggtcactcagtgcttgacgaggacgcaccattgtccggccgaggtaccgtcatgtcctccttgagctcatcgacgtcggtcaatcggggcgggaagccgcgcaaacggtcggccctgagtcggccagggcgcaaaggctcgttagcggccagcaaaagtcaagcgacgagtacatgagcagctctgatcagagcaggagcgtgctctcgagtgaccgagcgcgctcgaaagaggatccgactcaccctctggcgtcccagacgtcctccgagctctcgccgagcctccgacccgtccaccactctgcccgcctcttgacccacgcctcgcgcttccgctccggctccgtaatcttcgagagcgtctgccagcaccaggtaaagtcgtccgagacgcgctcgcacgtgttgatcgtgcctgtccgatagattgagcgaccttgctctttgaaggctgccggcgggcataggcagaaggggcgtcagcctcagcttagggagaccagaaggaggtcggcagaggagacacactcataaggcaccgcatcttgacatcgctgcaagtcacggtcgaagaggagcgtgggggttaggaagggcgtcagctcagagcacgcaggttggggtgcgccgcccagctcgagctcgcccgccaggcgaccctcctcgtccgatgaaaggcacacgcacaagagctgcatgcaagtcggcacgtccgtcacttccggatagagggcgttctgaagcgcgagctcctcggcgagcgtccgtcgtggccggtcgagctcgtactgccgagcggctgcggtctcggcagcggaggcggcagaggaggtcgtggctgcagcatcagacgcctccgaggacgacgtcgagggcggagagggagcggagctgctgctcggctcggctgaactttctgctgactgcgagctacgaaagagcttgccgaacatgacaagaggcggaaggacgggtgggcgttggcagctcttgacaaggcgcgcggcgcggtcgaggctgcagtgacgcgaggcagggcagcatgcgacagtggacagacagggcaggctcattggatggcatcaaaggttgaggtggaagtaaggcgaaagcgaaggaggtcaatggagaggttgtcgaagtagtaatgatgtacgaagaccggacagaaacaaggcgctgggtggccggcaggaggacagggactgcgctcccaggcccgattcggaagggctgctgaatctcagcgagaaagcgaggtaatggccttggagtcggtcggcatgccgctcgcgtcgacgccgttggcaccaaagtggcggcgggtgaagcgcaagcgagcctgggtggatgcggtggccggagcgtcgtcagcaaagggtatctgcctgcccttcccgaccggcagctgcgacgcacctcgtcgaacgagcagccctcttcaagcattatgcgccggacggcagctgcccctgccggatcgagtccctcgcgtgagtcgccggcgttgttggcctcgaggtcaaagttggcgctcgttagctgcgggcggtgcgcgcatgtgcaggcaggtgcgagcaagcgaggggacccgagcgacaacgcaaagagcagagaagcagcgcaggatgagaagcagatcgaggtcagctccgggccatccaccacagcagaagtcaaggggagggacgcacgcctgccgaagcctggtcgtcgaacgacgtcggcagccgggtatatccgccaaggaacccgcgctggcggaggaagggcaagaggtggtccgagacgagctggtagcggtgaaaggcccaggcgaggaggaggaggagggcgagcgtgctcaggtggaagatcatcctgaggcgtcggacgattgggctggcgagaagggtcgacgttggtgaggcggtcaggaggcgttctcgcgaaccgtcttgagcgtccagccgacgaccatctcgccctgaccctcgaatcctcctgcaaggggccaaaggcaacaagctcgccgtcgctacctaagcgcagacgactgcccgaccagactcgcagctcgagcagcaagaacgacgcggcccagcacgatgcctgtcgccggcgccgctgcgcccgttctctcgcttccgaaggcggccctcgacccgatccactttgaagtcgcccacgatggcgggtcgaagcccgtccaggacctcctgtaagaagtttgctgcagagctcgtctttgggacacgagaaatgcgctgaccctcctcctcttctccctgccgctctgacgccggctgcagcgaccagtacggcggcgctcggtcagatgcccttgccttccttagcggcgccggtcgcttcgactaccaggtgcgagcctagtctgatggcaggcctcgactgtcgactgaccctggctgtcgtcttgttcgagcagcccatcggcgcgcccgtctgtccgtcacccttcaaccggccggctataccggcccgcgcacgaccggggctgaccgaccatgctcgctcgcagattatgacagccggcctctaccagacgacaatcctcgcccttctcaaagcgccccgcctccgcaagcgtctctccgcaatcgcatcgcgcaaggccgcgctgctcgagccgctccgggcgagcgaggacccggaggcgattcagaagcggatcgaaaaggggctcgaaggggtcgctcggcggatggctgaggagatggccgcgaggatcgagagtcctagactgatcaggtgcgtccgagagcttcaggcttgctggcctgagtatatgtgaggctttgggcggagtcggccgagcgctgactagtgactgcgcccctccttttacacgtgtctctgctcggcaggacgtatggtctcgcgctccaaaccttttttgccaggctgtacaatctcggcatccactgcagcgtcgaggaaattgccaatgtccgtgccgagccttgtcgccaacacttttgtttccagcagggcgctaaccaaagagaaccgccacgccaacagctccgcaaggtcgccgtcgccgccgcggcgaagaagcagtcgctcatcttcctgccgtgtcacaagtcgcacgttgactacctgctcctgagctggctctgctggcgggtcggcgtcgcgctgccgcatatcatcgtgcgtctggtccctcttgcgacctcggtcggcgccactcgaagctgacccatttcgttttcgcaggcgggcgagaatctcaatctgccggtcgtcggcggtctgctccggcgtggcggagccgtctacatccggcgcaagtgggacgacggcgacgatccgctctacccgacggtcgccaagtgcgtgtctggtcgtgcgtcttcgatcgtcaaagccagtcaagctgacgtcttcaatctcgacagcgagtacctgagtctcctcatcgagcagggccacacgatcgaagtcttcatcgaaggcacccggtcgcgcagcggcaaagtgctgccgccgaaggtgcgtcgcccgtcttgccacttgcatactggcgagtagcaattgaacacactcctcgtcctccagctcggcatcctcaaggtcatcctggacgcagtgctcgagggccggacgagtgacgttatcgtcgtgccaatctcaatccagtacgagcgtgtgctcgaaggacggacctacgtcgtcagtctcagggcgttcaccttgcctcgcacggataatcgctgattcgacttggcgagcctcctcagcaagaaatgctcggtacgccaaaggaggccgaatcgctgtcgggcgtcctcagcagctcgtcggtcctcggggtgcgtcgtttgactgcagtctggaccctgtcccatttgctcactcttggtttcatgtctcgcctctcagctcaagctcggccggatcgacgtgcgctttgcagagccctactcgctccagagcctgattgtcgaccagacgtcgcgccggagcgctgttggcgagggccctacgttcgacatcaaggcacacgaggaggacaagcagaccttcctccgccagctcggctaccgcgtgctttccgacatcaactgtcagccagcgctcctttatcactggatgaaacgcgacgggtacctgacccggtcacccacccttttggcagctgcaagtgttgccatgccgtcagccctcgtcgccacggcgctcttgacgctccgaaccgatcgcgtacgtttatccctgttcatccacttgagctagttgttgacggctactttggcgcgcggtattgcagggagtctcgaagaaggagctcgtccgccgtgtcgattggctgacagatgcggtccggcgtcgggcggggcgcgtcgccgactttggtggcctgtcgactgaggctgtcgtcgaccggtgagtgctttcgccgacgcacgcccagccgtgctgagtgctgacgtcctgctttcaacaggaccatcggctcgctctcggatctgatcggcaagcgcaaggcgagcgaggtcgtcgatgagaccatctatgccaagaaacccatcgagctcagcctttaccgcaaccagattgcccacctgttcctttcggagagtaagtcgtgctacagccacgagagcttccgaagagagcttacggcagcttgcatccccttgcaggcatcctctgcgcctcgctctacctcaatatcaagacgggccggctcgacgagttcatgtcaatcgaggatctgacgaccgaggcgcgctatctgtcggacctgctcaagatcgagtttgtctttccgctcgccggcatcgaggagaatgtccgcaacacgctcgacacgctcgtccgcgagcaggtgctcgtggtcgagaacgactcgcacccggcccgcgtccgcctctcggaaaaggagcggtcgacgggccgcgagcaggtaacgttgacacagtagcttgttaattggtgtttcaactgactgaccttgcctttgtctgcccgcagttcgattttttctgcttttcgatctggccgctggtcgagtcgtattggctggcgtccgtctcgatgtacgcgctgcttccgtcgaaggcgtctagatcgggtgaggcctcgtggtcgtccgagagcgacttcctcaagatggcgcagagcctcggcaagacgttgttttggcagggcgacctcagcaacctcgaggccatctcgaccttctcgctccagaacgccctccgccgtgctcaggagctcggcatcatactccgcaagagggcgacggactcgaagcggcagctaatcgcgctagatccggcctgggcgcaggaagacgagcttgccacctgggtcgagcgggtcggcaccttccgtcgcgaagggaagtcgaggcggaccaacgagctcggtcggttcttcctcctgtgtttctcaccgctttgcgttcattcgctgaccgcgttcctggcagccgctcgccgggtctttgagctcgccatttcgctcaagctgcccgcgctcgagacgacgccttggccgctcatcgttgaaatgcccgctgccgacttcacgaccgcctctccgttgcctgcccggctctgaggagacgctaccctaccaaccgccctgcgttccatcgcaccacttttcttcacgacccgcacgacccctcccacttttgctcagtctgcgaacgatgaccaggatggagcgaaccataatgacaggacaggagcggtgcggacctacaaacgaatagagctacaaggggttcaaggggcggatctggatcggggaaaggaaggacaggataaagcgacccggccagcggctcgcgaaacgaatgcaggggcactcagggacgcgccagtccgattgaggcctcggtgaaccactctggtcgccaaggccgttcttgcgaatcgagcaggatgatgccgacatcgcttagcatctctgccatctcgcggacgcccgggagcgcccgacgaccggccgtcaggaacgagagcgtctttgtatactcgacttgaagaccgagccgcttaagcgcaggaaatcgttgccggtcggcgtggcggatgcggcagagcgcctggaccatctggtagatcggatgcgagccggggaagccggcgcgctgggtgcgcgtctcggtcccctcgtccaagtcctcacgtcggagggcctcgagcaggtcctttcggcgcgtcgccagcaactccccgtccccgccgccagggatgggctcttcgccattatcggcgtccgagtcgtcgtcgtcgtcgtcttcagtgctggtggcggccgagtcgacgtcgttcatgctgctgttgctgctgctctcgtcaaaattgctgccggcgtcagagtcgtccgaggcaccgtacaggtcgccgggggggatgccgatgatgagcgtctcgagccgctggtgaggcctgtcgaacagtccgtcgagcgaccggtcacagatcgccaggcgacgaaggttgggtaggacgacgagcggcgagaaggcgccttggctgaggctcggcttccggaccgacgcctcgcgaggaaggaggtcgagcgaggtgatctcgggtcgctcgccgagaaccttcatcacggccgcagcgtcgtccatctgaaagtcgcgaatggcgatcgacctgacctcgcgcggaatctcggatagaagattttgtaccaagaagtgcaaggccgagcccgtaaactcgaagcggcgcaggttgcagaggtcgaaccaagttgagagccgctcccaggcgggcagctccgctggcatcgccggatcctcgatcgacttgaagatccagagagagtagggcgctggccgtcggcagtccgtctgatcggcgttcatcattggcttctcgggctcccaatcggcccggtcgacgtgctcgagtgctggaaggagatgcagatgccggaggaatgcgaggccggcaatccggtttgcgcccgcgtcgaaccgcttgacgagctggccgaggtgcgggtaggtcgccaagcagctatagaactgcttgaagcgctttgaacgggttgagccgagccggatcgagcgaagcatgatgccttgcgcctccgactttattttaccaggaagagcggccccggcgtcagcccgcgccttcggggattgcgagcagcgtgctctagagcggacagaagtgaaggcgcaccttccactctggtgacacgaggcagagcgtcttaaggacctcgtagccttcgtgtgtggactcatcggcctcaacggctcggatgatctgcgtctgcagttcgaacgggatctggcgtggcctgatgggaggcggcgcgcgagttaagctcaggatgagactgcactgctgtcgtcgggaaggaaggggttgcgagcgcgacgcacatgctgctaccagtcgggatgcgagccggagcgatcttcgccggcaggcgcaagaggggtcgagccgaccgaccgaggcgggcgagctggagccgcactccagcaggtcgtcggagggaagggccagtagtcgggttgaaatgagcgatgggctccgtcagctgactggcgaaggctactttccttcgacaagaggcctcacctgagccgcaagaagtcaagaagagcgcgccgagcggcctgtcagctgtccttgacaagaaagcggtaatggatcaggggtgaacgggtgctgaggctagccagtattcatgagtcgtcggacgcgcgacttgagcgagccgaccgacgcgtctcgaccatcagcaacgacccccgaccatcgccacttgacccgtcttctcgctctctcctagtacgtacgctcgagggttgagcctgttacgagcgcgcgtcgtcggtcgttgatgtcgatcggacgagctgacgcccttaagcgttgtccagcagcagcagcagcagcagcagcacctaagcttgctcgaccgccttctctcctccctcaccctgcctctcctctcgacagcccgcgagcgatgagtctttgggtcgacaagtaccggccccggacgctcgccgagctcgaccaccacccggcgctcgcaaagagactcgacgcgctcgttcgtccccccgttcagctccttcaactcaccgccccttgccagccagcacggacgagcacactctctctcgcagcaagcaagctgacattccacctcctccgcccgctcgatcattcgctcgactcgttgctcgcccaaccgcccgctcgtctcgcaggcgagctcggccgacttccctcacatgctcttctacggcccgtccggcgccggcaagaagacgcgcatcctctgcacgctccgcgcgcttttcgggccgggggtcgagaaggtccgtgtcccctcccctctcctcgaccctaaatcgccgttagctgcttcaggctcgagcaacgccttttttggtagaacgacgacggctgacttcgctgccctgcctgcccgctttcgcccgcccgctgcacaggtcaagatcgaccagcgcgtgtttgtaacgccctctcgcaggaagctcgacgtcaacgtcgtccagtcaaactaccacatcgagctcacgccatcgtccgtccccctcctctctagcgcttccgcgccttttcccagcgccctattcaatgagtggagcgtcagagagtgcagtcgtggccgattggagagctgacctctcccgccttttttgcgatgtcggccggccggggcgtagcgacgttgggcagtacgaccgggtagtgatccaggacatcctcaaggagattgcccagacgcagcaggtcgaccttaacgcccggcagcgcttcaaaggtccggcctcccgcgcgctcgcccgccgtcgctcaatcagttcgtcgctcattaaaaagcggggccgctaacatctctctcccccccccccttccgcccgccgcacagtcgtcatcatcaacgaagccgacgccctctcgcgcgacgcccaggccgccctccgccggacgatggagaagtacatgggcaacctccggctgatcctctgcgcagaatcgacatcgcagatcattgggccgatccggtcaaggtgcttgctgatgcgcgtcggcgcgccgaatgaggacgaggtcagtttcggaacgcaggcatgccaaaccgtcttatttttcgctcagtcagaggggggcattgacatcccccgtgagcgaccggcagatgacgaccgtcctctcgcggatcgcgaaacgcgaaaagtttgcgctcccgccgcacgtcgcgcgccagctcgccgaagagtcagacggcaaccttcgaaaggcgatcctcgtgtttgaggcgctcaagatgcagtcgtctgtccccccctccctcccgtcctcctccctctctctcgttcgttctttcttgatgaggggctgacgcgaggtgcgatttcgcaaacggcccccgacaaagacccgacctcaacgccgaaacgctcgagacggccaagcccgactgggaagtttttgcccaccggctcgcagacagcatcgtcgagcgccaagacgccgagcggctccttgccgtccgtgcaaagctctacgagctcctcgcgcactgcatcccgcccgtcgttgtcctcaagacggtgacggatcggctggtcgtcagggtcgacgaccagattaagccagacgtcatccgttgggcagccttctacgtccgtttcgctcatccccttgctccccccccccctttctggcccgagtcgtccacggcctccattgtcggtttaggcccgctgaccccccgcgctcgctcgctcgctccctcttctgaacccgccggacacaggagctccgcatgcgccaaggcaacaagaaaatcttccacctcgaagccttgtcagtcgtaccctgacccttcccctccttcccccgcccttgcaccttttgtcatcagccgagccgtcgatctgcgactgacactcactcgaacaccccggcctcggcccttccagcgtcgcaaagtgcatgtcgctcttcaaggtgcgaggagcgctatagtctgaccgtccccagcaagtcaacacgagagagaaccgctgattcccttcgaccacgtgcgatcacctctcatagcgcttcaccctcggcgcgcgcgaagagatgtaggaacccgggagaaggaccgcgcgcggacggtcttgacggcagggaagaacaaggctgattagatgggctgttcgctcttctatcgagagagcgggacagggaaggaaagaagaatcatcagaagcggtgcctgccaggtcgggcgcagtaaaatcgccagcctccatcaagagccgccccgccgtcaagtcgtcgtcggcctgcagtgctcagcgtcgccctccgggttcagaagccaagtaaaggccgtcgcgccgcctaggagggcagtaaagacgaggtagacggcgaggcccgacagcgaagttcctgcgtcgagcgctgcgctcagcgtcagtaagcggcgctcggtccatcgcgggctggagggcgggtaagcggaagtcaggaccggcgcgagacaagagaggggcgcaaagcagagagggaggacggacaagtggcgcttgactggcccgtggaagaggagggcgacgagcgcgcccgtcaggaggatgttggccggcacggccgggatcaaggtcgccccgctgcaggcgatggcaaagacgctgaagcaggacggggataacaagggtgagtcgcgcgctcagggaaggcaaacggaggctgggtgggcaagcgcacaacttgtcgaagcctcggttcggatagcgccggtgcaggtagaaagtgatgacgggcacgacgacgccgaggggctgaaatgggcgggtcggagcggtcagtggcgcacgcccggatccgtggacgacgacctggacgcacgaagccgaggtctgcggtggggccgcaacgggactgctgcatcagaaaacgcttctgcatcgggctggggcagaactgcgagcactcacagagcaggcggtacttgcccgcgaagaagcggacgggcgagacctggattcatggagggttcagcgtcagcttgatcgtccgtggaggccgcccgatagactgccgactgaccgcgccccatatgatgctcgccgagtagaagacggcgggcgctcgacccgtccactggcctgaagtaaccgcgctggcccagacagttatcgcctgtatgaccaggctcggtcgctcgatctcacgcaccagccgggtcgacgagcgtcccgtcgaggtacggtcgcttggcctcgatgaccttgatcaacgtgaagtagtttgtgacggcgccaatgacggttccgatgatctgcgagagcatcatcttcttgtagctgcggacgagcggcgaggaggaggttcaggctggcgggtgagcaagcgcaagggcgcaaagcggacgcacgggatcttcaggtagagggcaagtctgacgcaaggagggacagacgatttagcgtgagaatagagcagatggctagcgggctgcactgcgcacttgagatcgctcgtcaggtcgagcgcctgcgacctgcgccattccgcaacggagtcagctttctccacctcggacagcgctccccgtcccgctcgactcacatcatcatgtaggccgagcatttgaagaagatgttgccaaccggcgcgccaggacggagcacgccaatgaggaactcggacacgacgttcaatcctattgttgtgccgctgatagccgagacgatgccgatcgggacgaggaagatgacggcgaggaagagggagaggaaaagggcccagattggcgtctgacgaggtactagtcagataaagagcggcagaaggcaataccgacggaaaagggggcacctggaggggcgcgaacgtgactagtacgaccgaggctgccaggttgacggcgatgatgccgacgaaccagctcctcgggaccggctcgtagctccgcatcagccggttgtggatgtcctcttcctcctccgactcgcccttccctctggaccacagtgctcgccggatctctggcccgtggaaaagggcgacgtgcgtgatgacagaggtgagtgctgcgaacgagaaggcgtatgagagggcaaagtatggcgtgaggaggaggggagccgcagactcccaggcggtctcgttgagcgtgaggtcaggcgagaggacggcggggacgtcgaatctgcgaagaggagagctcacggtcagtgcaggcctgggagaaattaggaacgaaaaagcgcacttttcgtgcgccgagttgaacatgccggccgtgacgggtgatgcaaagctttgcgcatcccagatgtcggcgaacctggcgtatagagtgcgagtcgttagcagagcgcaagcagagcagtctagagcgaaggccagggctcaccagagaatcggagtgatgacccatagcatgaaggccatcccgccgagatagcacgccagcgcccaaggcggcgtgtagagaggcccgctcgccccgaccgcactccagtcgaacgagaagtcgaggaagccgaggccgtcgtagcctgagccgaggatgcgagccgggaccgatgaggaggcgaggcagaggagggggatcgagttgagggagggggcgagccagcccgggaggaactgaaacacgggaggaaaggcaagcggcgtcagtggacgatgagtagaggcacggggactggcggccatcacttgatagcagaatgtcgcactgcatcggacgagcagcgggtgatcagaaagcggcctgaatggctagagggggtaggtagacgcacacaaagacgagcagaaagaagcgcaggctgccctggtctcccgtcgtccgatggagggtcgagtacatactgcacgtcacgagcgagttgggccagatcatagtctgcagtcgggcatcgcaggcgcgcaaggtgcagtcagcattgagcaggcagcgacgcggagatgagaaagtcagcacggaccgctgggcgaacgagtaggttctggagcaggccgctctgcaggaggaggggtaccgacgtcagcttccgcaagggtgaaggttgactctgacgcgtcccaggctcacgaggccgaaaccgatcagctgcgtagtgagcagcagcgttatgcctgcgagcgcatgcagctcgcgggaaaagaatagatctaagacggccacaatatctgaagcataggcagcgccgttgcctgactttgcgaggacacctactaggacgtgctctttgatcgaaaaggggccagggttgaggtcgaagccgagcagacgccgggaagggagcgtgcgcgcggcaagcttgccgagtggataagtgactgcgaggtgaggacaaagggaggagaggaaagagaggagagtggagggaagggaagggaagggatgagagggcagggagaagggtacggcgggagatgaccggaagcagatcagtcgaggcttcgggcggcagcgaaggtacgcgaaacgactcaccgaggatgacaaagagatcgctgaacgacgccgagttggagcggaagtaccagacctgccaagagcatcaaaaggcaccagtcagggctgcctgggcgggtcacgggcggaggacgacgcacctgcgacgaggcggcgccgatcacgcagaagacgctgccgaggacgacgacccggaacgtcagcgtcggtagcgtggggtcgtcggtcgtcgggaccgtctgcgtgcagcagtgctagtcagttttgtcaagtgctcgaggagaagggaagcagggacggacgcgtcgaatgatggaggcgaaggagccctcctcgtcgtcgtcgccctcgacgaccttggcccgacgccgtcgacgggccggcttgccatcgtcgtcctcgtactcctcgtccgagctgcttctgtcgtcggcgccgtcgagcaagccagcgtcctcgagctcgtaggcctcctcctcctcgtccgtctcccctgctcgccggctggagcgatggttgcgcgcgtcgccgctgcgcccggcgctactgtcgtcggcgacgagagcgtcgagcgcgagcgcatcggaggcctgccgaaagtcgagcgaggggcggccgttcatctgcgagaacagtcgactgtgcccgtcagacccaaaagctgcagggtcgaggaagaggttcaggaatcgggtcgtcgtccgaggaaggcttcgtccggtcgtttcagcttcggctcagcccatctcgtcgtctcccctccgaccgccaacagcccaggatggacacgctcaaggccgtcaacggctacctcgacaagatgtttggcgaggtgccagggatgaaagtcctgctcctcgacggccacacggtccgtcccggtcggcgagcacctgcccgcccgccctcagcttcagctcgggcagccatcgccgactgctgacacgcgctccgacctctctcgtctcgactctaccagacgccggtcgtctcgttagcgacgacgcagacttcgcttctcgcccaggaggtctacctgactgaacgggtcgagaagtgtgtcttccgccgctcgggccgagcctgatcggatgcgagtcgaccgcaagctgaccttgcctgcacccctgccagcaacaagcgcgaccggatggcccacctcaactgcataatgttcctctcgcccgacgctgagacgctcgagtgggttaaggaggagcttgcaaaacccaaatatggcggctactggctgtgtaagtcacgcctctccggtcgctcgctctgcgcagtcggccgtccgcactggctgacctcgaccgtcgccgcctcatcgccgcccgagcagacttttcgaatgtgttgaccaagtcgacgattgaggcgcttgcccaggccgacgaattcgagatggtccgcgaggtgcaggtgcgtcgtgtcctgggagcgaccgtcaacgcggcggccgactaacccctcccccggctcgcaggagtactttgccgactacctcacgctcttgccctcattgtttacgctctcactgccgccggtaacgtcgactcccaaggcgagtccatcggatgacgcttgtgactagtccaacagccggctgacccgcatcttcgtctgcggctctcgaccaggcgccggccgccctgccgctatacggctcgtcgccgcagtcgttccacccgacttcgctcgacctgcacgcccaaggcttgctcgcccttctcctctcgctcaagaagaagcctgcgatccgctgggagaagatgtcgggcacggcgaagcggctcgccgaggaagtcggtgtcgccatggccggcggcggcggcgtctatggcgacctcttcaacttccgagggacaagcgggccggcgccgctgctgatcatcctcggtccgtagcttttgtgctcgtccttcgtgcgcagttcagccaggctgacggaagaggctcggctctggtagatcggcgcaatgacccagtcacaccgctcttgtcgcagtggacgtatcaggcgatggttcacgagctcattggcatcacaaacaaccgcgtccggctcgaggacgagaagaagcccgagctcaaggtcggttccctgccgccctcatctgccaatccatcgagtcgaccctgacgacttcatcttttcctcgcaggatgtcatcctctcgcccgcgcaggaccccttctttgcctcgcaccttttttccaactttggcgacctcggcgccgacctcaacacctacgtccaagacttttcgaagcgctcgctcgcccactcgccgtcggcgatcgagtcgatcgcagacatgaagcgcttcgtcgaagagtaccccgagttccgcaagctcggcggcaacgtcagcaagcacgtcgcgctcgtcggcgagctcagtcgaatcgtcgagcgcgacaacctgctcgcagtgagcgaggttgagcagagtctggcgagcaacgagtcgcacacggccgatctcaaggtgggtcacctttgcgacaacccgtcgctaaacgtcagcgacgtcgtcctgaccctttgaagttcttggtcgcagagtgtccttgccctcttgaccgatacagccgttccggaagccaacaagctccggctcgcgatcctctacgcgctccgctaccagaaattttcggcaaacgcgatcccgcacgtcattgacacgctcgtcaccaacggcatggaccccgaccgggcaaaggtgcggcccgtctgaacttgtgtcgccacgtgcctcgcgccgactgactgccttcaaccttcaccagctcgtctacgcgatgctcaactatgccggcgccgaccagcgtcaagacgacctttttatgaacggcaacctcttttcgcgcggaaagtccctcgtcaagggcctccagggcgtcgaaaacgtttatacgcagcactcgccgcacttgcttcagacgctcgatctgctgctcaagggcaggctgagggagacgagctacccgtttctcgagacggaagacggattgtcgacgaccgcgcggacgcagaggtgcgtttctctcaccccgctgagtgtacccgcgctgaccctgcttgtgtgaccaactgctaggccgcaagacatcatcctcttcatgatcggcgggacgacctttgaggaggcgcgcgcggtgtcgctcttgaaccagcagctcgcaacggccgctgcgacgacgtccgggggcagttcgacggcgcctcgcatcctcctcggcgggagctgcatgcacaactcgacgaggtacgtccagcagcttaagactgggctcgtttgacggctaagtgctgacagcttccattcgcacgcagctttctcggcatggtcgagagctcggctacgcactttgcgccgtccttctacaccgcgccagtgacgttgacgtcggtcccggcaccactcaacatcagcctgccgcggctcgactcgttcctcccgccgtcgtcgacctcgacaccgccgccaccagcggccgacgcgtcagcccatcaggcctcgacgtcgccccctcctggtagcggatcggcaatcaacctccgtctgggcggctttgagattggcacggccggcgtctaccggacaggcacgccgaccgacggccagctgccagtcgcgaacggactccagatcgacccgagcaaggtccgcgagggacttaacaatgggctcgccggagcgcgcgactttggtggctctctactcgggaagatgcggacggcctcgggccggggctgagcacgcggcgcggcctgataggcaacaggcgaggcgaatgacgactaacgacctgggatctctttcatgaccttttgactttgggcggcgttgcaagcgagagtcgagagggtgtcgtgacgggcgcggggcggcgccgcactcccccattgccctgcgttccggctgaccctgccgaatctgcccctgtactcctgctccatgccctcccccttcgtgctgatcatcccgtccgaatcatctagagcacctcgtcgccgactccatcgacctctgccaacggcaccttccaccccaggtcgccttcaccgacgctggcgacgtcggccggctgaacccactggaaggcgaggtcgttgtagacgtcgttgtactgaaacgacgtcggcacgagtcggcttgtaaggtgaggagctgaattggttgcgtcagtcgctggtgtggacggatggctcaggggaggaaggagacgcactaacaagcggcacgcaaggcgcaatcttctgcagctttggcagcgggtctctacgacaggcaggcagactggagtgagaaaggcgacggcataatggtgagtcgagtggaccgcacctcgtcagataaccgtcgagctcgtttgcgagaaggacgacccggccgagcctctctttggtccagtttgacgccaacacattctggtagagcgtgcgcggacagtgcggcatgtagacgatggctacttcgtcgctgtcgtcggacagcggatgtcgaccgtactgagggagggcagaggacgagatcttgggtgtcagtgaggaagtgagagcaagaggcaaacgtcacataccgtgttctcggcgaggagggagacgccatacgaagcgagcaggggctcgtcgagcgccgtgaaggcagggtcaaaggcgctcagcttctcaatctaaattcggcggcaatgagagcggagcgtcagtcaataatcacagtgacgctagagactcgcggtctgactttgaagcgcgcggcaaggtcgagcatcagtagcagctgcagctgggcaatgcgcgactggacgacggatccgagaccaaagcagacgatgctggccggtcgcgggaacgtcggatcatcctccaagctctggacgaggactggcagcgtagcacgagagtcagcccgcgtcgtcgtccctgcgcagacgagcatgggcgacccggcgcagctcaccctcccacgacttggcccacgagccgatttcgagcagcttcctgcggccttcgatggcagtccggagctttgcgaccttggccgactcgtcctgctcaggctcgttgtcgtcggcggccgtgacggcaggtcggcccttgcggttcttgcgaccaccagccttggccgctggcgctagcgtccgatagcggatcttgctcgcgaccattgtgaagccgtcggcgtcgacatcgccgctgtcagcaacacatgctggcatcagacctgctgaaagtgtctctttgaagatggacgtcgacagagccaggtcggccggctgcgacgaccgaccgtccctccgagcagcgccgggcgcccgctcgtgcgcgagactcggcaagacgagccccccctcgcctgtcgaccagcctgcactcttgaccgtcacccagtcgcccttccaaacgtaggtcgttggccaagctgccccgctataacgggcccgaaagttgcaagctgactgctgactagccggccgcttccctgctctctcgtgccggtctcgcaacttagcatgtcgacctcgttcagcccagaggagaagttcgacctcatcacccgtaacctgcaggaggtgctcggtgccgagcagatcaagacgatcctcgccgacgaggcccggacgctcaagtgctactggggtgtgttgctcacgtcctgccctgcgtgtcgaagctgcagctgaccgagctctgaggtccccccgccgccggccgacgtcaggaaccgcgcccactggccgacgtgagcctcgtcgagttacagtcgctcgccctgtcccgctgctgatctcgaatttcgcccgcttgctccagcccacatcgcctacctcgtgccgctggccaaaattgccgatttcctgctcgccggtgttcacgtcagtcgactggtcgacggcgctgcagacgggcttaccttacgcacgaccggcgctgaccagagtacctgcttgccctttctaggtcaaggtcctgcttgccggtccgtttgagcgtcggattactgtcttgctggtcaagagaatgcctgactgaaccccttttgcggcacggcagacctccatgctttcctggacgcccagaaggcgccgctcgagcttgtcggccaccgtgttgagtactaccgccggctgctcatcgccatcttcacctcgctctcgattcccatcgagaagctcgagtttgtcgtcggaacgtgagtgccggcgagatcggtctgagctatgcactttggacgctaattcctccttgtgctgcgccgccggccgcctcccccttccgcaggtcctaccagctcaaggcggactacacgatggacgtctaccggctctcgtcgctgagctcggaccacgacgccaagcgggcgggtgccgaggtcgtcaagcagagcgcgacggcgccgctctcgtgcctcctttacccgggcctccaggcgctcgacgagcagtacctcgacgtcgacgtccaatttggcggcgcggaccagcgcaagattttcatctacgccgaagagttcctgccgaagctcggctaccagaagcggtcgcacctgatgaaccggatcgtgcccgggctccaaaagggtggcaagatgtcgtcgtcggaccccaagtccaagattgactttctcgacgcgccggccgacgtcaagaagaagatcaagggcgccttctgtgaggagggcaacgtagaggagaatggcgtcctcgccttcttcaaggcggtcgccgtcccgatctcgcagctcaagctccgcgtgaccaacgcgagcccgttcgtcgaggctggtgcgcccgaggggaccgtcatcagtatccggcgcgacgagaagtggggcggcaacctccactttgcgagctacgacgacatggagagccagtttgccgagaagaagctccacccgtcggacctcaagtcgggcatggtccgtcgttcgccgattgcgctcgctgcccgagtgcctcaggctgacaccccaaccgaccgcagaccgacgccgtcaacgcgctgctcgcaccgttccaggagatttaccggaacgaccaggagttccgcgacgtcgaggcccaggcctacccggtcgagaaggcgccagagaagaaggtcaaggtgcgtgcgcccgcgcgccttactcctctctgcttgcaagctgatcctttattctgcccttccgtccccccgccccttgtttgcgctcttgcgcgatccttctctttaggatctacgcatctcccggcctcgcctgcatcggcccatcactgctttctaggcatgctctctggctgcgctggacctccctcctgaacctaagcgatggcgcacgtcctagagctcagtcgatttggtccggaggcgtcatgctcatcggcccttcttgccaccgccagaggacgactttgtcgagaggacgtcgtaaaagatttcctgcgagagctcgatgttgccggcaaacttcttcatccgctgcttgcccgccttttgcttgtcgagttgcttgcgcttccggtcgaggcccgtcaccttgacgaggacgtcttttcggacgggacttattctagattgcgcgtgaggtgagggaagggatagtcagtcagtggagacggacacagagcacagggcggagggaacgtaccgctctgaagcgagtgccttagtgccgatcatcgcctggaccttctgctcgaactgctggcgcgggagaaggtcccggagtttggcgcaccagtgccttgcaatgccgtcggcctgtgagcgctcaacgatcactgggcgggcgggcgggcggagaagttcagacgagtcagcaagcgaggtgcagagtgtgggagaagagatcgcgaggtacgcacttgaaagggcgtcgagcgtattgccgttgatgttgatcgtcatctgtcccgatggaagcgagcgcttaggtgtcagaggctggcgacccgcccacttgcaaagagatggtccgaactttgacgctgtcgctcgcgctccagccggcgtcctcgtagtcgagagaggcaaaacctgaactcagactggccgggtggcaaaggagaaggtcgtcagcgcaaggggctggtcagcgtgagagagcgggcgaggttgcggcggcggtgacggacctcttgagctcgtcaaagaagttagtgacaatttctgacggtgtccaagggcggcgcacgtcgtcagcgacccgttacgaggaggaatagagggagggcggacggaccggccatgggaatctggtatttcagaagtgcccggttggagctgacgccctcgctcttgaggccgccctccaccttctctccgtctccgagcacgccctcgtcatccacggcggtggtcgagccgctctcgaggtagctgtatgacagctgaacgcctcgccggctgttgcagagctccatcattggcccgaggtagtcttcagggacgaggatcgtcgcgacgatcatgggctcctcgaccgagcaggccttgtcgacaacgtcggggaagtcggtcgggttcgagatgattgtctcgaggccgttgcggtcgacgactggcgagtcgggcgacgagaggaaattagctagaggacttgagggctgggccgccgggcctttatacaagcggagacgcacgcttgtaggggaccgacggggcggtgatgatgacgtccgagttgtactcgtcctcgagccgctggcggaagacgtccatgtgaagcgctggaattggcaggttggcacgagagagggagggggcacactctcaagtttagctgagctcaggggcgagcttggtgaagtcttgaagcagagggacgcactgcccaggaagccaagccgaagtccttggccgagcgcatgcgacgtctcgcgctggacggtgaccgacctgtccgagagcatgagctgcgagtgcgccagtcggccagaaatgaggggtgggatgagccgaggacgcgcacaagcaggaatcagacgatcgtcggctaggcaggtgagagagagagggcaagaagcagacacacgcggttgacagactcttcgagccgaggaaactcgttggcgtcgagcggaaagacaccggcaaacacctgctcgaatgctcggcatcacgtcagatggtgtcccggagagacgcatcatccacgagtgtgacggcgcggtctctagggggcgcgagaaggcagacggaccatggccttcgtcgctttgaagcccgggaggggctcgaccggctcgccggccttgtggaacgtgtcgccgacggtggcctcctcgacggccttcatgttgcacactgtcgcgagacggtaaggcgcaggataggtgggagaaggaggtaagcaggcgagaggcggggagagacggggtgagacggggtgagagggcgagcgtcagatctggagtgacgtcttgcaaaggcggtagagggcgacgccggtaggtcaaccggcaagcggcgacgccggcagggagggatattctgcggcggccgcaagcaagagggcacaacgacggaagggacgaaccgacaaagccgacctggccggcttgcaaaaaatgcgtgctctcctcctctggatgccggacgccgacgtcgagcacctcgtagcgcttgccggtatgggcgctcgcgatccggtcgcccttccggatgctgccgtccttgacggcgacgagcgagacgacgccccggaagcggtcgtactcgctatcgacaacgaggcctttgaacgccgcggtcgggtcgcccgtcggcggcgggatgcgcgagatgatggacgagaggacgagcgggacgccgagcccggatttggccgatatagagagggtcgacgagggagcaaggccaaagagggacgagagctggagggcggttgcacggggcgcggcatgctggaggtcggtctgaccgcccgcgatatccgacgaggagggtgtcagcgaccgtcgataaagggcggaccgatcaagtgcgctcggcagcagcagtggcggcaaagaggcaggaggagggtgagaattggccaaccttattcatgacggcaatcagctcaaggccgttttcgacggcgatcccatggacgctgatcgtctgcgcctggacgccctgcgtgcagtcgacgagtaggagggcgccctcgcacgcggcgagcgagcgcgagacctcgtacgcgaagtcgacgtggcctggcgtgtcgatcaggttgagaaggtagtctttcccgtcgttcggatgatggtagaccatcgacaccgtctgagccttgacggtgatgccccgctcgcgctcgaccttgagcttgtcgagcacctggcggttgacggtcgacccgcccgaggcgatcgtccccgtcgcctcgagcagccggtcagagagcgtcgacttgccgtggtcaatatgggctataacggaaaagttgcggatccgctcgggcggaaagagggccatgttgagtgaggaggcgcttggagggaggctgagcggagcagagagggagaaggaccggctgccgctgctgctgctgctgcggagtcgaggaagagggagcagcgaggcgagctgggaccggccggctgcccgtaagctgccagcgatgctggccgaagctgctagcgggcggaaggaggaggatgatcggctcgatccttttgctgccgctggcgatattcgcagcacagacgaggccgccgtcgttcgaaaggcggtcgtcggcagccggcggagcactggcgacaaggggtcggtagcggggggtttgcggggcaggcaggaaatgtggtgagctactcgcacctgaggcgggcagagaggtcgtcggcatagaggaagacagacggaaaggccgcatactagaaggcgggggcgaaaaagtgagggtgaagagggagacgacgacgaaagtcgaggtcgaggttgaggttgcaagcgagcggcccctggaggggccaggacgcttatcgtccccgcctctcctgatcattgaccccacctcgagcagcgacgtcagaggttactctcaaggcagatatccatacttcaacctcctgtgtagctcaaaagaattggcgagcgacctgtgcaggccctctcgcccactcggcgtccctccgagctccttctcctgcggcccgacgcgcgcagcaaagagccagcgagacggcggcatgagcaacaaagtcgcccgatcgaaccttcgcctatgactctacggaaggagagagaaagcgagcaggatggacgactgctcgcgtgcgtcggtagtagaagctggtcggaggcgcccttgacggtctccgggtgagctcgacgataacgcgccggttgccaggagagcacgccgccgtgtttgcaggccgctgctgaggagcctcaagaggaatcgaccgggacgagactctgcgtcgtcttggtcgatgagaacgccagagggccgtcgagacgatggccaggctgattgcggctgctcttggcgaagatgaccgcttgggtgacgagacgaacctccggcgcagcgccctccggtctaactacataccaccagcatcgaccaaccccttctccctctcgccacgcctcgcgtcttccagctggcacccggccaaacggccagcagcggacagagtctcagagaagtccgtcttcctctcgccctctttctcctcccctgcacaatctgggacaacgggcggctctcgcgctcggccggcacctgccctcgccctcgcttgcttcctctcctccctcgctccctccgaccttttgccaggcacgtgcctcgtcctcgcagcttcacccggcaaaggcaaactcgctcttgccaccctccgacgcgcgcagctcgggtcagcttcggagtgtccaggcggctgatctgcctgccacacccgcctcctctcgttcagctcgcgccggccggctcagtcgaaggaagcgcggacggtcgggcgaacgcacgccctcagagctcgacagaacgaccgggtgctttgcagagttgtgcttgggctcctgtcgacccacgaccaccacctcaatcgccctccgtcggacgctggcccggtgagcttgccagccacggtctgcttgccgaggtagtactcaagctcggcagctccctcgcatcctcctgctccgtcaccagcagctcggccaaccatggcggaacctctcggcactctcccatcctctagtccatccgcaatggccgccgtcgccgccgccgccggtgctgcgacaggcccgacgtcatcggccttcacgaccgcgccagcctcccccgcccgctcgtcctcggcccgcagcagttccgtctcgagcagcgcttcgcagcacgccgcgcgccggcttgcaaagctcggcctcccgccgacgggccccgtcagcctgccgaggacagagctcgacgccgagcggctcgcggaggccgaggcgcaggtccgggcgcacctccgcaagcgacggaggagacggagtctcttttttgcgcctgggatcgcgagggcgcggccctttgcggaggagacgaagggcgacgctggatcggcgggtggcggggtgggtacgctgccgtcggcggagccgtcggtgcctgcaactgctcccccgccgacagtaccgaggacacccccggtcgtcgccagctgtccaccgccggcagtggcatcctcctcgtcctcgtccttttcggccgcctcgcccgtcggcatcgacgtcgctccttcctcagccgccacgcccctccgcaagccccgccgacggcgctcgaccctgaccgctgcgaccgacgttccctggacgccgccctcgccgctgacggcgactacgcccggcggtgggccgctctcgacctccaaggtcggccttaaggtccgaagggcactgtcgcttctcgcccacggcgacggccatgcgtacgcgggcgatgcggacgggcctcgaacggctgggccggatggcgagcaccaccaccaccatcaccaccagcacgcccacggccagcatcatcacagtagtggaggtgccgggcagaaccgtcatccgtaccagtacgtcggagggagcgggactggcgactatctcagccggcgcgagtcgaagcgccgcgagcgggccgaggcagagtcgcatgccgcccagcaagcggcggcctcggcgtggctgctcgagcgggcgaccggcggcggcggaggcagttcgggcgtggctggaggaggagcgggcgacgactcgcccttcccttatccggtccatggcgtccggctcgagcagcgctcgaccgactcgccccgcgaggcctatctcaaccggcgcgagtcgctcctccgcaacctccgggtgtcgctctccggcagcgccggcggaagcggcacgccaacctcggcaacaacgtcccgctacggcggaggcggcggcggtggcggcagcgggggtggcttccctcttggcgcagggagcgcgcttggctcacccaggccgtcgttccgctcgtcgccttctgccggctcggtcactgcttttcctcggagcgacagcacgggcggccggcagacgccgcccgtcactggcctcccgcggacagcatcccctaccggcctctcaccgccggccgaccgccggccgagcgcaagacggagcgtatcgccccctttcccccgttcagcctcgtccgcgacgtcctcgccccagctgagccgccacaactcgctcggcggcccggcggccgcttcttcacctggcccgaatgctggaggccgtcgctcgccgttcggccgcgagcatctccttccgccgatcaggctcgaggcgccgacgccgcttgtcggccggacgcccgaggcgagtccccggcgaagacctggcgggaggccgctcgagcccgactgcgaactcgacgatggcggcagcgatggccgtaagcgcaggctgcaagatccgtttagaccgcaggtacacgcctcgcctgagagcatcgacggcgccttctacccattggcggcggtcggtggcgctggcgagccgagtcccggtcggtcgctcgtcgacgaggcgtcgccggctgcgtccggctcaagcacgctccctcctccccttccatctcaccaccaccaccaccaccaccaccaccaccatcatcacacccccgcgcgccccgccgccctgccaccaggcgcgtccacaaacacgctcactaatgccgcgcggcggaagatgctcgcagcgctcgacacgacggcccggtctgggccggcgagcagcggcggcgggagcgggagcagcgcgcagcggctcttgcctggtggtgggccgacgacgacaggtgaggagcgaacaggaggagggacggagctcgatgacctggcgcaggcgcaagcgtcgaccggcctcggtctgctcggcgcaaacgacctgctcgagcggtcaacatccacggctgtcctctcgaatgacgacgatgagcggctcgctgccagacggcaaacgagcgtcggcggcggcaggagtcggccagagagcatcgtgcgcgggccggagggaatggcgctcggccaggagggcgggcacgtcgtctgggagcggctttgggagaaccagcgggggtgcgtcctccctccctactttgaaaccctgtgcttcccgaccgctgactgccccgctctcgcgcttctccagcatcctcttcttcggcaacccccgcttctcggctcgcatgctcctcccaaacgagccggccaacttcacccggcctggcctgacaaaggccggctgccggacgccctacaacctgaggagcttccaactcccggacggcgcatgggagtgggcgagcgagtggatggtcaacatgcggcgcgatggcgagacggacgagaagggctgtacgtccccttggcactttcactctcgctatccttgttcgaggctgacgggctgtttgtttcgctgttgctaggggagtacaattcgtggttcaagatcaaaggctggcatgctgtcctgccctggcacggctaccaaggctgggtccggcgccgcgaatggtccgtcctagttgcccgtctcgccctcgctctctttccggctgacctctcgcgctcttatcgccttgaaggatccgactccgcgtcctcaagccgctttcggagagcgcagcgacggccgacggcgagacgctcaagcagcagcacgccgactcgcccgctctctcgcccagcctcttttccgacgtcggcttcagcgccagcggcggcgggcgttatcgaccgacgaccagctccagcccacctatctcgcccggcggcggcggcggcggcggtacgagccccgacgtcgaccctcgcggagcctacctcgaagcagcgacgtttgcccgctggcacaccgagccgctcacgctcgacgaggcgctgagcttgctccgctcgttcagctgggacgctgaccggctccggctctggcgggcctggctcgccgaaggccaaccgacttcctccccccgcgcgtcctcccctatcccatcggccgagcacgacggcgcaggagggatcctcggcctccaggcgcttgttgaggagcactttggcgagctcgcagggacatttacgagtccggtttcgcggctgaggctgcaggatttgctgcgggcgacgaggccggcttggaggttgaccacgttgggctggtaggacgtcggggctgggtgggccatgctgggcacggttgatgaggcatctatgattgctggaggcttgagggacgaccaacgatgggaccgaacgttggggcagggtagggcggccgattcaagtcaagtgcttgaagagatccgcgccggcccagatcatcatccgagggcggagcatcgtgcctttcgagaattgcacatccccgcgaggagctgcaataaagggctgagagcgtcgggcggttgatcggctcgtgcgtggaagcctgaccgcgagcgctcctcgaggggctggctggcggagggatcggccggctcggccaggaatcatctcgagctcggtccggcttgaaataagacgagacggaagccgaacgacaacctcagagcagggcccctgtcggtcggtcggacccgcgcttcgtaccgctggtcggtcggtcgtcagccagtcgagacccggtcgcggtgggctttattcggagcgataatggttcagcagaagagagtggaggagtagctcgacgggaaaaagacagcttggacggcccgacggtcggagtttgggtctcactgagtgtccctcggctcttagtcttgatgcaaagcgtatcagtacttgcccaggcgttgcaacctgccaacgctcaaagaagaacagaggacggcgaataggggcttgactgcacgcggcaatcgctgccacgtaagagcttctgacgacagggcctcggcccttcccgcgtgggcctctgtttttctgcctccgtccgtcgtcgccgagcttgcttcgacgaggctgaactcaatccgccggaggggcggcaagcgggcaagaggggcgacgagccagcagaccggtcaccatcaaccccgagcgacatcgcagcctgctttacgagtcaagcagctagcaagcgcatccacacgtcatacccactagccagccagccagccagcctgctctcttccgcctcgccctccctctcctcgccctcgccctctccgcaacgatggccgccgcctaccacggcagccaccttcaaccgccctcaacagcagcagcagtagcagcagcagccacgccagccgccgccggcgatggctcagggacgtcgacttaccgctgggcgcccgtcatccaggccaaaggccaggcacggaacgacctgtgcgtccgtcttcggctctttgtctcgggaggcttgttggcgcaagggggttgtcggcgggctgggtcgagctcgggctggtggctagcgggggtcagggtggacgctcgcgggagctcgaggcaggcgtgcgaggacatccgtctggctggtcggctgtcagaaaggcgcttgacgggcgtgttggtagagccggacttcgaggcgagaggggaggtcggacgcgtccatcggttgggaccggccgaggacgcctccgtcttggcctcgccccgagccggcaggagctcttcaacctgcctgatgaggcctttgccgatgatggcgaagggctcgcggccgagggatcggagctcctgtcgctggctggccgacgggtgccgacgggcggagctggatatctcctgcggtcggtcggtccgccctttgtcgtcggctggaccaaagggcgatcttctctccctcacagaaggagggaaggggcaggctgtctgcccttccctttggtcgtctcgacggcgaccctttcccttccctgccgctgccctttgtctgctggcggcgcttcctcctgccaactacaagagagctgacggttccgtgtcctccgacctcctcctcatcctccttcccttccttccatcaccatcggcccatcaccctcctcggtcatgcttctcaccgcccacctcttttggccatcaacctcccgctctccccctcccgccgaccccgcccgtcctcgccaatccctgccgtccgcccttgccctccttgcgccgctgccctcctcgcccatcactctcgcgcccttcgtcccgcgtacgcgtctgaaggaggtgcggcgggtggggtgagaggagaggcacacgaacaagcgagacagctggcccctaaaaagaagtgaggtcgtgtgaagcccgggcggagggaggagtcagagctcgaacacagaggcaggtctgtactagcgaaggaagagaggggcgtgttgaagagcgtccgcctccttctcgcccggcacccttcttgaagaatccatcgacccgccgcacctcccggacgctccagcaagcaaggcaagcaagccgacgagctaaagtctcgggtcagctcggacctccccgtgccgaccggtcatccggggagggagccgaactgtgtgcctgcctacctaccttcttgctccgggcgcgtcgagcgatcgacgtccgagggcaaggcaggcgggctcgacggcgaggtgagccgggcagggcagaggcggacgcacatgagcttgacctccttctctgggaatgcttgttgccagaggcgggtgggcgggttggtggagcgagcgagcgtcggtcgacggggagatcagggaggcgttcccagcgcgcggtcaggcaaccaagcgagtgtgagctctctcgcacgcatggcctacgtgcgaggcgttcagcgggtcagcttccccagggcgcgagacgaacgtcatgcccgaccgagcgagctcgtcgacggaagggaagaccgggcaggacagaggtcgtcagacggggagcgacagtcgggggctgaaaccgaaagcgggctggcccgctcgccgttttcaggcgagtgcccaggtcggggcgagttcaggggccctttgccccactcccttcgcccacggcacacgaaggaaaagcgggtccaggtcggaattacatagcgcagcggggaagagaaggcagaggcaaagggcaggggaagggcagaggcggatttgggcggatttcacgcccccgaaatgaggtgatcgagcgccttctgcaaattgtagtcgccaatctgcagcggaatgagcaaacaggatcaggacctttgctcaggcagcaggagtggtcagagagacgtacctcaagcgcgttgagcgcctgtgtgcgtgaaaagcccatggaaacgagcttcttgacgtcggggatgtcgtctggctcggccgcgctgccggcgccttcggtcggccgcgagggaagcgatggccgttcggcctgctgctgctggggctgctggaggtgacccggcggcgggccgacgggggcggcgtactgctgctgctgctgcggtggcgcgtcggcaaaggcgtcgtcaaaggcatgctgacccggcgcggccgaagcgtgcgactgctcgcccgcgttagcgctggcggccggtgcgaaaggcgacgagccgaacgcgtcgtcgactgagaaggcgtcattgctgatcggaggcgcgagctggaccgcagacgctgcgggagggccagcagtcgtcgacgtgaaggccgtgtcaaagtcggcgaacgacgggtcaaagtcgtagacaggcgtcggaccggcgccacctcctccggcggccgagaaggggttgttggtgcttgcggcggcgagcgaccgggcgacgacggggaccggctcgaaatcggcgtcgaatgcgtcaaagtcgtcgttgccgaagctgtcgtcgaagacagcggtcgacgggggttgctgttgtggctgttgcgggatgggcggctcgcgccgggcaggaattggcggcggcgtcggagcggccgaagagggagcggcgggtggcgcaggaggaagcggcgaagctgtcaaccgagtcggagcagcgtcaaacggcgaggccgttgtcgagcggtcggcgggctcagccttgggcgtctcgtcctctgccgggccggccgagaagaacgggttgttaatgccgcccgtcatcgggacaggggcaaagtcgccgtcaaacgcgccaaagtcggccgcggccgcggcgtcgttgccaaacgagtcgtcaaaggcggccgtcgttggctgacgagcgtcgacaggagggaaggccgacgcgattgagtgctgaggaggctcggacccggcgggcgagagtgggagagggatgccggctgcgatggccgctggcgccgctgcgaagggcgaaggggcgaaggcttcgggctcgtctgacgcaaaggggtcggtctccgcgggctcctcgctggcggtggcgcccgcgaaggcagacgggacaccggtagcagcaggagcagcagcgcccgtcgattcgaacgagccaaaagcgctcgcggtcgaagcgaggtgggacgatgcctcgcgcgagaggctcacgccgccgggcacaacgccgtcgttggcggcgggggccgagttgaaggcttgcggctcatcgtccgaccgacggggaaggtacgacggctggctgtcgagatcttcggggccgtcagcctcgtcgtcgctcgagtctgcgtcggcgtcggcgtcggcatcgaacgcgggctcgacctgctgttggcgctcaacgacacccggcgcggccgagtcgaagccggcaggtgcggcggtggcagctttggccgttttagcttcgtctgctccagccacgttagccgtcgtcggcgtcggatcgcgcacctcatccccatcccgctcgccccccgagaaaatctcgttcgcaccagcagcaaccactccgccggcagcgacgaccgccgcggcagcagctgttgcgaggccagcgatgatcgacgggctctcggtgggctgctcgtcggcgtcatcggcggcagtggtggccgcaactgcggtggggtcgatgtccttcggagcgttcaacgcgccgacggccggaggggtcggcaaatcacgaacggcgagggccggcgggccgtcaaacgcgtcggtgtcggcgcgggtgttatcaacgttggcgtccataaaggccgtcgtcgtcgtctcgtttgcgaacggtgagccggcgtcctgctcctgcgccacagcagtcggcagagccctgtcgtgcgtctcgtcgttgctacctgcgctggcgggcgcgtcgtcggcggcggcggcggtttcgttgttgttagccgacagagcggcagggacgatcgcggctgggacgagcgaggcgatggcagctgggattgcggcaagggcggacgagggcgaggcaggagacgaggacgaaggccgggcgggggctgcaacggagagaagcacggcgagagagatgtcagcgggtttatacccgaagaggggacaggagatggacataccggccgaccgagcggccgcggcctgagccttcgtcgccgccgccgcgctctctgcatgcgctcgctcgcttcgctcaacctcctcctttgcctccctcgcttcccgctccgcctcctcgagctccctctccgcccgctccgactcgaccctcagcgcctcacgcgcgccctccgccgtcgaaagctgcttgacggcgattgccgtcagccccttctgctgcctcgcctccttccggaccttctccaccacctccctcgcctggctgctctccctctcgagctccccaagacggcgcttcatccccctcacgtcctcccgctccctcataacctgcccgtcaagctcgtccttctccgccttgagcgccgacagcgcactctccgcactgatgacctcggccgtcaggtccgccttttcgcgcgcttgctcggccgcgcgcgcccggaggcgctcgacgtttgcctgctcgcttgtgtgagtggaccggagcgagatgagctttgcttggaggtccatgagctccttggccgtgtcgagcgttcctggttcgagggatgcgttggtcgactggagatcggagaccgagtgggcgagcgaggcgtgttcggcgcggagcgaggcgagctcggccgggaccgcggtgggcggaggaggggcgggcgagcgcgtcggaggaggtggcggagcagcgcggaacgacgctccagtcgcctggggcgagagcgtcgctccgatccccctctgctgctgctgctgctgctgctgctgctgaggttgaaagccgccggtctgctggggcgagagagcacggaaggagcctgtcggctggggcgagagcaccggggtcgagacgaaggcgctggacgacgtcggctggggcttgagcggggcgagaccccctgctccacctccgagaggggtgaaggaggggacgaacgggtcatcgtcgtcgtcgcccatcaggttcgagtcggccgcaggcgtgaaaggcgccatgccaaagcccgagttggccgctgcaggcccggtcggctgctgctgctgcggcgcgggcgcgggcgcaggcgtggagtagtttgtcgcggaggagggggttgcagggggcgagtcaccgaaagcgtcaaagagggtcggctggcgggctggctcggaggcgggtcgaggagggagaaggatgtaagtgtttgaaggggcgagagtcagcgacgatttgcgtctccacaacgctccgtctaaaggactgactctgcccaccagccccctgctgctgctgcgccggcctcagccccggcgggatgagcgaagccggcagctcagccggcagctcgtgtcctgcaatcgcgcgcttgatgaggtgcatcgcgacggcgaactcgtcgcgcgttagggagccctctttgcggatgtcggcgaggtccctggaggacggaggatggtcgtcagctctttggcttagcagcctcgcttgagagacgcttgagcgcgcgcgagaaaggcaagaggaggattggaagatgtgaaagaagtaaggggggcacgcaccagacggccgcgagcacgctctccggcagctttgactctagcatgaacggcacggccacatcgccgtcaatcacccctcggccaaacttgtcgaggttcgcaaagaagcgatcggatgcctgcttctcggcgggcgtgacgtcccatgcgacctgctgctggagctggggctgctgctgctggggagcgaagacggaggcggactgctgcggcggggtcgggctggcaaagggctggcgcgaggagggcgagctgggcgaggacgtcggctggccgaaggcgctgagcgtggggttcgggagcgcggcaggcggagggtggcctttgaagcgcgggagctgactgggggctgccagagggaaggaagggagggggagggtgtcgtcagcatccagcagcgatggatgagatgagatgggcagtaaggagcagcacacgcacccctctcggccacatcgccctcgaccttccccccggcctggacgccgccaatcagccgcatggcctttgtccacccggcgacatccaacgccccccggtctgccgggtcggcgaccgcccagatctcgccgagcgtcgctggcgggagggcgctgagggtgagaaaggcataggcggcttggcccgagatgaggttgttttgggcgagctgggcaaagagggccgggtagaagccttgctcggccggggtgactgtggcagcggaggaaccgagggtcagttcccttcgtgcggttcttggcgagggagagagggagagatgcgatggtcgatgctccgaggagggcgcgatccgcgtcggaccctcctcctagcctgacttggaactctctcggagcgcatacagccgtgtcttgtggagcagactcacgaggctggggtgccatctctgcgacggcttggtgggatgaatggaaaggagggtggcaggtgagggctcaagacgcgcggaggggacggacgagatggccgcccctcagccctcgcccgccaacaccgactccctccttccacctctctacactctcccacgccatgtcggttcctaggaagggtcagtctcttcgtgcacgaccgacagcttggcccttcagaccgcctcctctcaaactgaccgcgacgctccttccgacgctaggcgagaacttcgagctccgcgccgacctcaactcggagtaccgcgagaagcgggcggatgcgatcaagcgcgtcattgcaaacatgacggttgggaaggacgtcagcggcctgttcccggacggtcagtcgctcttgctttcccttcggacgggctgatgagcgagcgacgcgctcgtacgagtgaagggggggaaggcagggcgctggaaccgcaggcgatggtcctctcccttcacctcggctcgctcgcctgtctaggctggtccccggattggaaggagagcgctcgaaggctgatcttgctgttgcttcctgattgatttccagtgctgaagaacatggtgcgcgcccggcttctgcccgcctgcctgcccttaccatcctggctcccagccccagctggctaacctcgatctcctcgcctccctggcctcttcagcaaacagaagacctcgagcagaagaaggttcgctctgtctttacaggccgctcttgagtggaccccaagagaggcgagagggactgacgcccccgcccttgaccgcgtcccgcagctcgtctacttgtacctgatgaactacgcaaaggagcagccggagctcgtcatcctcgccgtcaacacctttgtcaaggttcgatccttggccctactcctctcgctcgcgtgagacactgaacccctttcccccgggtgtcgtgcgcaggacacggccgacccgaacccgctcgtccgggctctcgcgatccgaacgatgtcctgcctccgggccgacaagatcctctcgtacctctccgacccgctccaccgcacgctccacgacgagtcgccttacgtccgcaagacagccgctttggccgtcgccaagctttttgacctgaagccgtcgttggcacttgagggcgggttcgtcgaggtgctgcgggagatggttggcgatgggaacccgatggtcgtcgcgaatgcggttgcggcgctgagcgatatccaggaggcgtacgaccaggcccggagccggcagacgtcgcgctcggacgacggcgccgaacccgcagcggacgacgccgactccgaggacgaggacgatgactcgccctcggcgctcgcaggcggcgccaaagaactctttgcgatcgacggcccgacgctctcgaagcttctgatcgcgctcaacgagtgctccgaatggggccggatcgcgctcctctctgcgctcgcccgcttcaagacggccgacatcgagacggccgagcacatctgcgagcgcgtcatgccgcagttccagcatgcgaatggcggggtgctgctcggcgccgtcagggtcgtcatgattcatctaaagacggtcgagcgggacgagctgcgaaagatgctcgtcaagaagatggcgccgccgctcggtcggtccctcccctgcactcgcctgtgccgctcgactgaccgccctcgccccacgctcgccccttagtgacgctcatctcgtccgcgcccgagatccagtgggtcgcgctccgcaacatttcgctcctcctccaggccgagcccgacctgctcgcgagcgagatgcgcgtcttcttctgcaagtacaacgacccgccgtacgtcaaggtcgagaagctcgcgatcatggtccggctggcaaacgaggcaaacgtcgggacgctcttgtcagagctgaaagagtgcgtcttctccctcctccctttgcgctcgcccaccgcaagctgacgcacacgctcaccgcccccccccccctcctcgcaggtacgcctcggagattgacgtcgacatggtccgcaagtcggtcaaggcgatcggccaggtcgcgatcaagatccccgacgccgccgaccggtgcgtcgcggtgctgctcgagctcattgcgactcgcattagctacgttgtccaggaggccgtcgtcgtcatgaaggtccgtctccccttcgccttgaatcaaggccggctccgccaggctgacttttcaccctcacggggccgccggctcgcaggacgtcttccgcaagtacccattctcgtacgagggcgtcatcccgacgctctgcgccaacctcgacgagctcgagtcgcccgaggccaagtcgtcgctcatctggatcgtcggcgagtacgccgacaagattgataacgccgacgagctcctcggggcgttcctcaagacgttcaaggacgagccatacgctgtccagctacagacgctgacggcaatcgtcaagctcttcctcaagaagcccgacgagagccagcaaattgtccagcaggtgctcgagacggcgacgaaagaatgcgactcgcccgacgtccgcgatcgggcgtacgtctattggcggctgctctcgtccgatccggccgcggcaaaggccgtcgtgcttgccgaccggccgccgattgggctcgcaaagacgacggttccccgggcggtgcttgacgagctgctgggcgagctctcgacgctcgcgtcggtctatcaccggccggccgagacgtttgtcggccgggggcgggtcgggatcgacgatctgcagcggagggcggcggcgcttgcgctcgagggtggcgaggacggcgtgtcggcaagggacaaggcgctccatgtcgtcgagcaaggccagaaggccgagaatctgtgcgtcgaactcgaaaccctctgcttacccgccttttctctccaagctgaccctccctgctcctgctcctgctcctccccccccgtctcctctcgccaggctcgacttcgacgacgaccccgagccgacaacctcgatcgctggcgcctcatcttctctcggcggcctcgacttctcatcctcctcgtcatcctacccgcagcagcagcagcagcaggcagcgcccccgccggcagcaacgacgaacccgctcgacgacatgatggacctcttcaaccagtctgggctcggcgcaccgacgtcagcaccggcaccggcgtcgaggacggcaccagtaaaggaggcagcgtcgccgtttgattcgctcgggctcggaggggggttcggcggcggcggcctgcaggctcagacgcagacgaagccgccaccgcagcagcaaccgcagcagagcgacgacctgctcggcctcttctgagcgtgggcgcgcgcacacctgcttctatacctttacatgatgacccctccccttacgcttgcttgtcgtgtcgggccagcgggagacggcaagagcagtagggtcatcgaggacgggttggctgacctgcggctgagggttggggtcggcgagctcggcctccgacatcaagtcgccctccgcctcccttgttctcacctcccgtctcgtctttcccgactcgcaccttcctcgtcaccctacctcccagacaacgggcgctcgtatcgcagggcggaagctgctccaaccctagtttgtgaggcagcgagccctctcctcctgccccccccccccccccctcgacccgacccggcgtgagatgtctgtcggcggcgctagcggcctcgaagccggctcgcaccgccgcaaacggtcggcctcgccggacggcgggctcgtctcgccctcggccggactcgagagccccgagccgagcggaagcggtcgagtcggtcaggcagacggcggcggcggcggccggggtggccctcagctaccgcagccgacgttcaagctcggcgggacatcgtctgcgtccagccagcgagacgcagcgcgacaccaacagaagcagcagaagcagcagcaattgcgagcgggtgcccaggacgggccggtcaagcggccgttcaaggtccggcgcaaggaggacgacatggcgtcgtatggccgggcgctcgaaggctgcagcacggtcggcgactacctcgtcgagggcgacctcggcgtcggaacgttcgggtgcgtcctgtctccgacttgcctggagtcctacctgcttgttgtctggcttctcgctgactcgaatctgtccccgactctgttgcaccatgtctgcccgacgctctcagcgttgttacaaaggcgacccggcgggatgcgacagggacgacaaaggtcgccatgaagcgcatcatcgtgcacaacgagacggatggtgtgcgtagacccgttctgctgtgccgggggtccattcgctgatctcgatgagccgacacgccccgccaggtgcccatcacgacgatccgcgagatcaagctcctcaaggcgctcagccacgagaacattgtcccgctgcacgacatggtcttccaggagggtacgtcggccctcgtctacccgtatagctgagctttacgcgcccttgctgaccggttggcgatcaaacccggcccgggccaggcaccgcccagacgcgccgggggacgatcctgatggtcttcccgtatatggaccacgacttgtcaggcctgcttgacaatgagcgcgtcatctggacggcgccgatgatcaagctctatgccaagcagctgctcaagggcacggcctaccttcacaaggtgcggtctcccctcagtcgttcgactatatcccgctgaacgcgcaccccccccccccaaccccccccgggggaaacgcggtcgtcagagtcccgctgggcgacgacatcaagcgggcccagacggaccttctggtcgagcgtcttgaaggtaactgtcctggccatcgtgaaaggtggaggtgatgaggaggaagggcggggttgctggtgggcgttggaggagggcgtgctggctcgctcctccagcgcgacgtcgagctcggccgctagggccagccagaggtgatgatggtccggccgttcctcgcttgagagatgccacagcctggggctcgacgatgtccctcattcctgctgaatgggtctactctctgcgagtttccgacagaatgggaagtttcctgcggtggcctgacgctcttgcgcactggcgcgcactgaccgcagcggcgccgcgcaccgacgcctgtcaacccctccccgcttctcgacagatacaacatacgatccaggtcgcgctcatttatgacgtgagcgtttgcgcgccggcggtaggtcgtcggccgcgctggattgctcgtccttgatgacggcggcggggcctttcctcgtcgactgcttgtcaacgccgcaagagccgaccgatcagcctcagtgtcgctggaccgacggcgacggcgggtatagtgggacggcggccgtcaaagtgaaagctggtggtggtaggtgacagaggacgcacccgctgagccttggccttggacgcaggcggaggcaccgtcgggggaggcgagagcgatgacgaggtcgacatggctcgcttggccttggccggcttcggtttggcagccgacgacggtttcggcgaggcttttgcacgggaagccgttggtgcggccggtgatggcgcaggctggagggcggcgacgaaggccgacgttcggccgcctatctgtgacaggcgaaagagcaattagcatgtaggaaagcctgcggcggcaagtcttttggacgtacggtgatgtactcgacaacggccggcgtgccgtcggcctgcgagaacagggaagcgtcagcccgctctttgctgagtacgaaagcgtcgcgcaagatgtaccagcagaaactcctggccctcgcttttcttcttgatcttcccccagcgatgacgcatgagccatccgggagggaacatggtcgagtcggcgttgacgccgacggccgtctggcagacgtagagcatcttttcccggacgtgctcgacttgctcggccgtcagcgtcgaggcgaccgtcaacgggtgaaggccggcgtggaagagaatttcgtccgcgacccagttgccgactccagcgcagctgattggtaggtcgacgaaggagggcatcagttggtgtgcgcagggaattggaggagagcagcgccgcgacgtacacggcttgatcaagcaggacgctcttgatcggcgaccggcgcttgctgacagccgcatgccacgcctcggccgtcggagggctgacgatcgggtcaggcccgagcagcgacagcggcggctcgttaaccgggtcggcccgcaggcggatccgaccgagccgccgagggtcgctgtacgcgatctgtacggcgtcgggctcgcccggcgccgccgtcagatggaggacgaacttcatgtactttggcggccagacggtgtcgtcctccttgccgtcttgatagcgcaggcccttttggccgaggacataaattcgacctgtgcgaggtgcagccagccatcacgggcggagtagaagggggtaagctgacaaggcgcggagcgggcgtcggatcggctccagctcacgcacctgtcatgccgagatgcatcaccggcatcatccccttgccatcaagcgtcaggaaaaagctgaggagacgccgacgacagaaggaggtcaggctgaacgtcgcacgcagctaaggaaagccgagcagtgggaccggctcacttcttgcccctccgctccgacgtcagcaccttgcgtccgacgagcgccctctcgaattcgtcggaccggacgccgtcaaagacaatctcgtcgacggtcgtctcgacccggaagattgtccggccgacggcggcctcgtcgatgtcgcgccggacgcgctcgacctctgccgtggggagcgggcagtaagcgacgtcggtctctgccatctgctggtgagaacgcctgccgggcgccgggacgcacctggcagctcgggcatgggtcgaggaaagggaggtgggaggggcagcagggacaggtgtggctgtcggagggtgccgagcgcgggctgagatcgatcagtggtgacgcgtcggccgcgcagccacagccctgagcttcctgtcgtcggcgtcccctgttgcgaggtggcaaaagggacgtgtaggagaggtcgatccggctgctctttttggcaggcccgttctcaaaggtcggctgtacagggcagtcgagagacgggtaccggctggctcacctgcctgcctgccgagttcgcatcggcgccggccgaagacggtcgagtcaagtcagggtcgcgagcagcggtcatctcgtcgccagcaacacccatccatactcgccttcaacatgtcgttcgcgatcaagaacaagtacgagcttccgccaaaggtcggcgccttttcctctgttcgtcgctgagagcttggtgctgacagctagcgtctcctgccctgcctacctcttaccccgcacctccgtccgtcctgctcgccctcgactcgcccgcccgctttgttggtcgaccgacgacactctcagcggacctttcctgagcttcacgagtcgactcggcccgaagactacgatgtcaacttctgcttccccatccgcgagctgtcgacctcgcgagtcaccctcgtcccgttcatcgtgagttctgccgctgctgaacgcctcgagacctgcggccgactgatggctgtctctctgctgaaacgtcgcacgccgccgccaccagccctctttgcacgccgacgactacatgaagtttatgcaagagggcgatgcgaaggctaccttgtgcgtcgatcgccgcctggcagctggcaggtcggctgcgcacagctcttgagtcgctgacccgcctgctcctccgcttgcacatcaaagtaagggcctcaattggggcccgttcgagtcgaaggaggagtttctgcagtatgtcgagtttcaaagaagctcgccggtgagtctgcgctgcacacggtccgaatgaaccgccggctgatgcgtctcgcctcctgtcgccagacgatgatcctctttgccgtgctggacacgactagtgatgcgccacgctttgccggtgtcgtcaactattggcttgccaacctccggacgctgagcgttgagctcggctcggtcatgacgacgctcgcctaccgccggacgcacgttacgacgcatgcggccggcctgctcatcgcctacgccctgacgccgcccggagtgacgtccaagctcctcggcggcgggagtcagggcggcctcggcctccgccggatccagtggacagcctacccatacaaccagccgtcgatcaagtgtgcgctccggcttggcttcactgaagaaggcgtcctccgcaacgggtacgaaaagccggctgacccgaccaagggcaagcacgacgagggcaacgccgacctcacgcgcggccgcgagtggtcgatggagccttgctacgacgaagggggcgaccggaccgagcgcggctttgcgcaagattgctggctcgcgagcatcacctgcagagactgggacgaaggcgtcgaaggccgcctgacggagcagatgaaccgaacaaagtagaaggggcgaaaatctacatctagatcagcgccttgcagaaaagacgagatcaagagacatgtcttattcagaagttcagtcggcgagattgtggcgaaggttgcgcaggccctgcttctcccagacggcaatgagctcgtcggccctctctgcgatgatccaggtgttaccctagcttcagagccagtcaaggtcgctccggtggtcgtggccgtctggcgagtcgcccgagaacatgagcgagtcgtacgagttcgggagcaagctgcggaggagtcgcgttcagacggagttcgcccgggactggaagcggcgtggcaattcactggtcgacaaagacaagcggagagttctcaacttgatggtgaggcagcgtgtacgagccgagatcgaatctacatcggttcagagtgagcgtcagcgcacactcgaccgccttgcgaccgacagcgacgcacgccaccgacttgccctctgggttgaaaaagtcgcccatggcggtgaaagtatcgagaccgacgcggtcgtcatcacgaagcttaccctcctctgagcgccggtggccgtgcgtctgctcgaatgcccgcaggaagggctccaagttcccaccgggccctctgctgttgatctcgaatgaaatggtaagaggtgaggccgcgtacgactgggaaaggacagagtcagaacagagctggccaaaaactgcagactcgagccaacaaaagcgcacttggatcgaatgctctggatcgttgagcaccataggtgccgtgcgttagtagaccggcaagacaggaatggtgccgaatcgatcgagtgcttcctgtcaagtcgaaatgactaaatcgtcagcgggatcgccgagggctcctgacgatccttcagtcgttcccggtcgagctgcgcagatataagggcctctcgatgacggaaaaggtccacgacgtcgccgtcttcgtcgatgcctacatcaccagcctcagccagcagccggcggctctgctatccgatccggacggcactcgtcaaaaccgggccaggaccgttcactcggcgctcgtcgatatcgtagacggcttccgcggcggcgctcacctttgcttccaaacgccgcctcgactgaaggcgacctcgcctctgttcctttatgcctctcttgacgaactttatgacgcgaacgttgggatgatctttgtgtaagctgccgaaggcgtgagacagtgtctgcaaaacggcgcattcagacagggtaagcgtgaatgcgaagagcagcctgccagcggggcgaggagagaaggagagagcgaccgagccatgtggctccgagggacggcgaatcggcccgcgtgcgtgttgtcattctcctagcttgctgtcgtcagtaataaaatgtctccttgtgcaacctggcccgtccggttcaagttgctgcgactcatcaaacaagtgaacctgtcaagcttaacattccaatacttgcgactctcgaccatatccttacccacccggagccgttgaatgacgaccttctttgccacgaacggcgaagctctgaagttgtatcgagcgagctgcatcaaatccggcaaagtcgagttactgatcccactcctcgacttgggccatgaagtcgcctgcaagacgcttctgaccttcgaagccgtccggcagagcgcggatgaccaggtacttgcgcccttgaaggacagtaccgtcgagcggggcgtccagcgcgaggttcttgctgccaaagaggtggccgccggcttcgagtgcgatagccgtcccgccgcagacgtcctgccgagcgatggaagggcaaacccacgtcagcgagatccggcgatgcagagcggagcagcaacaggcgcaacgcacccactcccaggcaccgatctcccagaacatgtcgagttggccggcggcgacggcgcagaagttgagcgcggccgagccgatgcagcgcgcgccgcgaatcatcgattcgccctcggcccggccgagcagccggccaaaggtgcgcatcttgcagcccatcgtcgacgctgagcggtcggtgccccctagaggtgcgcccgaggtcaggtcgcaacttctaacaaaaccggagcaggagacacgcacattcgaagccgacgagcgcctggttgagcgagtcgagtgggaccggcttagcgagcgggagccggatagactcgtttagccaggcgccgtgcccttgcgccgcgctgtaaagctcgtttgtgaacggattgaagacgacgccgaggacgggcacggctctgagcgtcaatccgatcgacacgcagcatgccgggaagcctgaaggggagcgtgagcggaataggccaggcggctggccgaagcgagaatcatgcgcagcagaggcagcggcagcgacgcaccgtggacgaagttggtcgtcccctggcgggcagacggcaattatcagtcagctcctcatcgcgaccgcccatccgtagctagcaggacgcacatcgatcggatcgacgatccaggtcgggccgtcgccgagcgtccggtcctcgccggccgcggccgactcttcgccgatgaaagagtggctcgggtagcgcgcgccgatggccgcgaggacaaagtgctcgaccgcttggtcggtctcggttacgagctggcaagaggggcgacacgtcgtatcagctaggacccgagcagagagagcaagcttgagaaagggacctacgtcggccgagttcttcttctcgtcgacggccgagtcgagggccgtgctgcggctggccgagccctccttgatgagcttgccagcctgcagcaacaactgcacgtcagcgcatgctcggctcagggacacaaaaggaaggacgcacttctcgagcgagcgcgatggcgaagctgaggatctcgggcaggtcgagctgctgtgtgtggggcatggctggtaggcggttgatgggcgtcggaggggcgggctggaagggcggcgagctggttcgaacagagtgtggagaaggtagtggtcggcaggatggccgagctcgcttccgcttctctctagcttcagaggttggacttagttggttgataggcttgtcgtctagtcgatacaagctcgactgtcgaggttggcaggctggaggaagacgaccacggaagggccgcggtcgggccgagcttggcgaaccgggcgtgtgaactagaaaccagcggttggtgtcacctggtcttcgtccatggcgatttgtcgctctgcaggagatctgccgtcagcgtgatcggttgctgtcggttgcgagctcgacagccaccttgacgttcgtcgtcagcccaagctcgtcgacagggcggcgggttgctgcgcccgggccatttgtgctggccgctttcacctgcctgcgagccctccttcgaacgtcctgcccgacgacgacgaccacttgttcgagcagacgacttgcatgggcaaggcaggaccgactctacacatcctcgtagccgctgtcgtcgttaagcagcccctgcgcgctgtactctgcgaggcctcgccggtgcgtccgacaacggcgcctcagctgtcggtcgctcccgccttcggctatggctgacttccgagagccctgctcgttgcctgcagccctcggaccatcacctgcctcgcaccagcctcccagactgccagagatgatcccctcgccacccgactcgcaccctcactcgccggcagccgcgctcggctcgctcggcctcgtcgttatcgacggcagggaggcgctcgagctgctgcctcccgtcccaccgctcccgccgcacgtcgtcggccgcccaactcgcgcgtcgtcctcggcccaagcaagaagcaatcccgacgcgctcgcgaaaggctgcccggctgctggctggcagtcgtacgccctcacgcccgacccgtcagccgactcgcttaacgtacgaccgcgcagcggccgggcgcctggctctggcagcagcaacagcagcggcggcaacagcgcacgcgagtcgacagcgagcagccctcggaagaccaagtgcgagtcgggcgacgggtcgctcctcgattcgccctttctcagcactcgggacttgatgacgccgccatttgagagatcggaggacgagggcggcatgcggcaccagagccttagcgtccatctggcccagcagcggccactaccgccaggtgagtcatctcgctcgtcaggcaggcgaccagcgggctaagtgtcgcctatgccttgacttcatcagccatgctcggcgagtcgtgccctcggcggacttccgacgacggcctttcgaccttcccgctaagcccgccgccgtcagacgcccaacggcagacaatcacgcagccgtcctcgccaagcacgcccccgacgccgttcttgcggacggtcaagtcgcggaccttcatcagcatgacgacgacgacgacgacgacaacgtccgcatcggcattcggcgcgcactctccggttccgcccctgccgactggcttctttccctcgtcagagatcggcgactctgcgattcgacctcgtacagcttcgaccggcatcctcgacattcgggtcgggactagcccgaagaagcgggcgagccggccggcgagcgtccgcgactggcagtcggacgacgatgacgacggcgacgagggtctcgaagtgacgcctggtggtcggagcggtagcacgcgccgccagggttcgcgcccagcacagacgaccacctcatcgcctacatcggcttctcgtccggcgaacgagatcctgttcccatcgtcgcccagcggctttcggcagcacaagtttagttctgcgcggtcggcgcccgactcgcggaccaacctcgccggcatgctctctgccgcactcaacatgagtccgacctcggccatcgccaccctctccgcgccgcaggatctcatcataagcggggcggccggcggcgatgacgtctcgaccgacccaaacgcttcggcgtcgccaggcgccgtcgtaagcccgctcccggccttgtcaaaggccatcacggccccaattgccccgctcgcccacgtcctcgccttcgtcatcatctcgctcgcggctgccgtcgcgctttcgacggtcctcgtcggctcgtacggcctgacagcatgggacgtcacgcgcttgcgcgtccgcgacgcgcgcgagacgctcgaggacggcaagaggcggatcggcgcgggcgtcgagcgcggccggcggctcattgacggcgcggtcgatggcgcgcgagggcttgcggaagggcttgtcgactctgcatcggccggccttgaggacgacgataatgaggacgacctcaagggcaatcgcggcggctctcgcgagcgcattcgcagtcgcacatcctcgggcctgtcgtccgcagggtcctcggccggctcaacgccgcacaagccaaaggaccaccgccatctacgttcgtcgtttgtcgggaaggcgacggcatcggcggacgacctcgtcggccacgtcgccgactcgttctggcgcgggctcaagcgcgtcgtcccggccgcggtggtcaagggggcgctcgaggcggccgaggtgcggctcggcaagcggccagcgcaattccgtaaggacacaacgcgccggcggcgatacgactctggaccgcccgccgctcagaactcgccgtcgggtggctcgggcagcagcagtaacacccgcgactcgcaccgccggacggcctcgagcgggacggcaactccacgctcacccgacacggctcagtcgtcgccatttgcgcaaggcgagtctcgctccacctatgcctcaacgatgtcgacgtcgccgcccgctaccgctgcaggcgtccgctcgcccgacaccggcggccaatcgacgcctcagtcagacgacgacgccgagccgttcccttctttgtctgcccaccggcagcggcagcgtcgccgttcctcaaccctcccgccgcggccgccgctaagcgtcctcctcccgagcatcctcctcacgctcatcatcgcgttcggcgcaatggcttacaacctcgtcaagcggcgcgcgaggtcgccgtcggcggacactactggcgacgaggccgatgagaaggcgcgccgcgatcgccggcggatggcctgagtggcgcgccggccgtcctcccgctttctccttcctttccgttttgcgtctcctagattctcgtctctcctcttctccgcccccggctcctttgtatagcccgcctctgaccttgcaccctagcctccaaacgccactcacgccaaacttctcacatatacgacccagcccttctgtccttccgtccatccattccgccctaccaagagtctcctcctcatgccccacctttcctcacaaaaacaaaacgccatgccgctcccctccccctccccttcccgcctgccctgctcgtgtaaacaccctttcgattcgatccccatgttgtgccagagaacgacgacgcggagctagaaggacaacatggatcgactctggagcagaagcgggcaaatgagcgggcgggcaggcggtccgatcagaggaagccgggcgggagcggggtgcggctggcgagagggtaaaagtgagcggaagcgggcagaggcagggctgctgatggtggaagggcttcttccctcctgtgatccgataccctgcaaaccagtcacgagaaaccttcattcgacctcgccagcttctctcggccgcaagcgccagacggcgacgccccctcgccgcctttcgtcgtcttgcgcccagtcccaaccattccaagcgcgggcctcctcccacccggcgtccggtcgatagccgcgctcctcgagcagcgcccgcacctcggcccccttcggcccggcgaggagcgtgttgaagaagacgaggtgcgacggccagcgtttgatcgacgggacgaagcgctcgagcgagcggaacgactttgccgacgggtacggccggggcgggaagtgcatccggaggaagcgcgccgggtcggagtagaactcggcctcttcggtcggatgttgggcggtcgcgctgagcgtcttgggcggcgggcaggtgaggaaccaggcatcggcggggccgaggtctgaccggtggaggtgcgactgccatggcgtcgagtggcacggcattaggacgccaagcccgccgccggctgaggccagagggatcgccgagcggaggtaggcgatcgatgcatgctgggcagcgccgtggcagacggaaaggtagaggacgggcgagatcgcagcgagcgcgaggaacttaaagacgaagcgcagttgcgtgggggcaacgatgtcggccggccgcgtctttaacgttgacgtcggcgcctgcgctcgggtgatagagagcgccgtcaagacgtgcaggaccggcaggaccgggtggatgaagcgccactccttgtgaccgccgcacgagtagacgacaacggtgacgacgacgagggcggccagctcgtgggttgctgctccctttgccggtccgattggaacggttagcgcgcgaccgaaagccgggacggcccatggtagcgagaagccgaggaggacgggcaggccttgcgagaggtagaagtgtccggtgttggcgccgtagaagagcgaagtcgggagaaggatgttgtacgtgaagaaagtgagcggaggaaaggcgaagcggagcgtcgactcgggtgggggcggaaagaggaggatgtcgatcatcgtcgagaggccgaagacgaccgtgctgccagattcaagagtcagctactgtgagctagagcacgagacgcgcagcggctcggcacggacaagatgaagaggacgtcgccgacgaggcgtgctgcgcgcggcaagccaccctgctgaagctgccgccggagcaggcaggctccggggacgatccagagaatggcgttggtcggccgaatggcgcacgtgatcgccacgacgatcagggcggtccgccacgagcggcgctctgcagctagcgagagagatctagaggaggagagtgacggccagacgctgagggcgaccgaagttagggtcgtctcaatcgagttggcgaatggccgcagcagggcatgggcgtggaagacagaagtcaggctcaggtagagctgtcaggggcgcatgcgtgaaggtgcctctgttagcagattgactgggcgaacgaaagcaggtcgcgcaggacgcaccgctgccggtcctgcttccgctgacaggcgtcggccgagagcgaaggttgccgtgtcgcagattgcggcgagcaaggccatcacgacctttggagctggaaccttgaagcaggaagcacgacaaggcgtcagtaggtgtaggcagctccgtccgcgacttcagcctcgtagcacgtacgacgagagcatcatcgagcccgagcgccttgagaacccagaacaaggccgcccagatgccgacccaggcgctgccccgcagcctcccttcacctagccaagcccatcgatcgccaagcacctcgacaggcgcgttccactcccactcccacgtcaggaagccgctgccaaagacgacgtaatgggccggctcgagcgcctggtacgtctcgtccggctggaagggcgtccgctggaggagggcgagcggcaggcggatggccaaggcgaggagaaaggcattccggagcgttttaggccgtccgaagccagacatcctgcgccgttgaggagagcgaaagatgggtcgacggaggaggaggaggacgaaggaggttgagcagcggccgtcggctggctgcgcgtcgactgcttcgagcccccggattctggagtgcatgcccccagcttgggtttcttccagcacgcgcggccatctctcagccctcggacgcacccacttctctcgctcggctcgcctcgacccgaaccaacacacgctccgctcgacgctccctcttctttgatcatcgctgcagcatgtcgaacttccgtggaggccgctcaaagaagtcgggcatcagcctgatcgtcatggtgcgtcgaggttcgaggctcgtcgccctccttcatcggaggcgtcgaaggcgcgcgcgcgccttctctgtccattccgacctagttagagggctgactgctcctgtactcgtctactttggtccgcaggtcgccggccagtcgggactcggtcggacgacgtttgtcaacacgctctgcgagcagcccgtcctcaaggggctcgaggttccggccccgcaggacgcgcatctcgagagcccgctcgtcatccggccgacaaccgtcggttcgtccctcgcgttgcctactctgcgccgcggtggcagcttgccgaagagccggagctgaccgagacctttgcgatggcgtctgtttggcagagctcgaggaggacggcgtccgtatcgccctgaccgtcgtcgacacgcccggcttcggcgacaacatcgacaacacggcctggccgaccgagattctcgagtacctcgagcgccagtacgacgaggcgctcgccgaagagtcgcgcatcaagcgcaacccccgcttcaaggacaaccgcgtgcacgcgctcgtctactttatcccgccgaccggccacgccctccgcgagctcgacattgtcctgatgcgaacgctcgcaaaacgcgtcaacgtgatcccggtcattggcaagagcgacagcatgacggtcagcgagctccgcgacttcaagcagcgcgtgatggaggacatcgagtagtgtgtctcctgctcgcggctcgagagcggtggccgggcgcagcccaagaggctgacagtctcttcgcctcgtcgtgcgccttctgcaccctcagctacagcatccccgtctacaacttcccgtacgacgtcgaggaggacgacccgctgaccgtctcggagaatcaggccctacgcgccctgctcccgtttgcgatcgtcggctcgaacgaggagctcgagatcgacggcgagctcgtccgcgttcggcggctgccgtggggcgtcgtagaggtcgacaacccaaagcactcggactttggcgcgctccggaatgcgctccttaggtccgtccgttcatgtccatcccatcaggaccaaggctgaccggcgcgcgcgtaaccctactcgacagcacccacctgactgacctcaaggagatcacgcacgactacctctacgagaactagtgcgtgtctcgatgcggcccacgatgttcccttctgctgactctgtcgacgccttttcgccagccggacggagaagctctcgcgctcaacgaacggccgcgagtcgaccatcctgccagacggcctgtcgtcagctaacggctcggccgtcggcccccggctcaaggaggaccagctccggcgcgaggaggagaagttgcgcgagagcgagctcaagattgcgcgcgagattgccgagcggcggcaggagctggtacgtccttatgcgactctcaaggtcaagtcgaacttgcagctgacgccatcgcatccactcgtccgcagctcgtcaaagaggagacgctccgcaacctcgagagccggctcgcagcgcagtcgctcaactcgccctcgtcgcacaacctcggcggcggcggaccgggtaccgagtactagcgccgtcggccccccttcttctttgccagcttgcttccgatctcccttcagcctacgacgcttccgccacccctcgcttctcacgtatacctctgctggaccgtcgacgacgcctctttgacgcgcgtcctccgcccgcctgctcctcctagcgcgactcctgaagaattcatgagtcgttatcccatctggtgatcacactggcgaggcatctctccggccctcgcccgagccccagtctgtctgttcggcgctcatgcggaagatgatgtcgccgccgccgacgatgtcggcgtgcttcaggatcggccgctcgagcgctcggccgttgacagtcacgccggcgacatacttctcctctggcgcgccaggcgctcggatccggagcgcaatgtcgggctttgtccggtcatacgggtgcggcagattgatgtcgatcgacgagaagagcgggctcgcgataacgtactcgtcgctcgccgggttgactgggtaccagccgaaggccgaaaagatgaagaaggcactcatctgcccgaggtcctcgttgcccctgagcccttcgggcccgaggccatagtcgccgtcctcgagcgcgatagcatgcacgcgctcggccgcacggctcggggagccggcgagcgagtagaggtaagggatgtggtgtgagggttcgttggcgtggtcgttgtggccgccgtcaaagtgctcgtcgaggaaagcgaggaaagcctgacgcccgcccttcagctcgatgaggcctaaagcaaggtcgagtcagccgggcggccaggcctgtagatcgcgcgagtgacgcaccaggtacgtcgtgcatcacatcaaacgtgtacgcccacttgtcgccctcggtccagccttcgttgctgccggcccagctgccgtttgcgaagcgcgcctccatgaagccggtcgcactgttgaaaatggatcggtaggactgcgaccgggcgaggtagaaggcggcctcggccgagtgtttcgtcgcggcggcaatggtggcgaccgcaaagtcgtcaaaggcgtaggcgagcgtgcgtgagccggcctcggagtgctttcaagcaggggagcgcacaggttaggagccagcaaagagtgagcatcagacagtgggctcacctcctcgttgccgacccagcccttttcacggtagagcgtgagtccggcccgggcctcgtagccgacgttctcctcgcggtcggcgtattgcgtcgtcgggtcgttctcgggcgggacgtcggcatccttcctgacagcctcccaggcgagatcaaggtcgaagccgtccgtcatgttgcgggcgacgcagctcgcaatcaggctgtcggcgtgggtgccaatctgtcgggaccgaaggatgaggcatcagcgcaaggcgaccaggccgggcaactagccatggaacgagccattatgttagtctctacgatatttttccacagcggaagccatccctcttgccggtagtcctgaagcatcgacgtgacgatcccgccgatgcgctcgggcgcaaagaggatctcaaacggccactcggcccggaaggtgtcccagatcgagtaggcggtgtagctctcgccctcgtgaatcttgtcggtgtagcccgagtagtaacggccgccctcggacgtttcagacgggtactggagcgcgtgccagaaggcggcttgcagagagaggggagtcacgtgtcagattagcttccggagcaaagggaggctgcgcagctggacggactataaaagatgcgcttcaacttgcccctttcgcgttcggcgtcggcgccgttaaatcggacgcggtcgagcttctcgctccaggcagcccgacaagccgcagccgtctgctcgagcgtccgtccgtcggggatttcggcatcaaggttgcgtcgagcctggtcgatgctgataaaggaggtgccgatccggacaaccacctcgcgtattcccttcgggaaggtggcccagcccgcgatctcggtcccctcggccaggtgcgtctggcccgggtgaaggacagagccgctcgccgtgccgacgctctcgaacgggatgtcgaagcgagcgacaaagtagccggcaaaggatggtgctggagagggtcctaggatccagtcttggcgcctgaaaaacgggcagagtgttagtcgcacggcccaggaaggaaaggagcgcgagagaccgactccgggttgcggccgctgatctctctcctggccgaatcaatgtggacggcgccgcccaagacgtccgtgatattgttcgggtccgacgtgatgaccgtcttgcgcgtcgcctgcaggacgacgaacggcggctgatgagcgtcaaaggtgtagcggatatggccgacgcgcgatgtcgacgtgtgctcgccgacgatccactggccgtcgccggccgacatcttgacgcgatagtgcgtgggcgacagctcctcgtcgtctcgcgagaatctgaggccgcggtcagcaaaggccggcttgacccctcccacacccgcctggacagcgcactgggcagactcgcccatccagatcgcaggctgatgcgtgccttggaaccctcggatttctgtgtcagtgacattgtagggagtcgaggagacgtactgcaaaagatgcgagggtggtcagatacgccgagatggtcagataccagtcgacgacgaaggggggggggggggtcgctctgtgacaaaggacggacgtttgctcgcgtgacggccgtccaccgagtcatagcctgtcgcacgcagaaagaaggtcagtccttgcgcttgaaagagaaagattgagcagacgtgcaaagggcggcgccgtcgacgggatcatgccgcccgacgcattgggctcgtcgccgccagtgccctgttgtcaaaggggcagcctagtcagcgccttgaaatctgagggggcgagtgggaagcgcccatcgcaccactaggggatcaatgagatcgatcgggctgatggattgggacgatagttggctgaaagacatagccaaggtcgtgctgaccgagcgccccggccaggcgaggagggccgctgcggatgagagcgcgaggagccgctcgaccgggacgagcgatggccggccggtggatgaggtccccagcagagcaaggacggccaggagaatgaggagcactgccagagcaatcgctcgaggcgtcatctggagtcggtcggccatgctccgtcgagccagtggcagatggtcgagctggctgcgtcggtatggacgacgggaagatgatcagctggcggccgctgacaacccgtcgatcctcgacagccaagccatactggttcaccgacagtccttgtcgaacggccgagatggtcaggagcagggtgatgagcaggcgttgcggcctcaggcacgcaaaggaggaggagacagtcggagggacacgaccgcgttggttttggccgaaacgtcgtcccttgcgcaggcaagccctggctgccggctgcccctggtaaccgcgaccttgcctgccgccttgaccatgagcgacaccctgccgccgctcgagctctttatagcgagtgtcctcgcaggcctttcactcgaggccgttgccgaggacgaggcgcagctctcgtacattgctgccctcgtcggagaagaggtcggtcggtgatctctcgcgcagacgccagacgctcctcgaggctgacgtcctgcgcccgccctcctgccaggcgctcgaagacgtggacaagctcgaggccgtcaagggtctcatcgattgcgagggcaaggaggtgcgtcttctggagctcgaccgacgtccagagacgccgtctcgctgaccggctagacctcgttcggacgctgcctgatccaggaggccgagtcgcaagaggctgccgaacagattctcgaagagttcaagcggctccaggccctgcctccagatcctgtcgaggaggaggtcaaaaagcccaagaaggccgcaggtcagcaagcgggctgctttgttggactccggcctgcgcagtgctgacgcctgccccttctcgtctccgcgcagcgccggctggaccctcggacgaagacatcgcgcgacagcgcaagcttgcgctcatcgctcagtacggcatggtcgaggacggtcacggcggctacgacattgagggcgggccgggtcctggcgaggagggttacgtcggcggcaagggcaaggggccggacctcgacggcgtcagcgtcgacatgctcgaggccgagctcaagcgaatgggcctcaagaagaagcagaagaaggtccgtcgcggtgcttcagtctcttgacgtgtctaggactgatcacgccacgttgcctctcggctgcccacagaagctgaaggaggaggacggtgcgtctgcctgctccgccgtttggccagtcgagacgctgaccaccgcctccgcctcctaccagacctactcatgccgaacctcaaccacgagaagatgaagtaccaggaaaagatgaagcgcgagaatgcccgcaaggcttccgagcagaagcagacggtcgacaagtcgagccgtgcaaagcagctgtgcgtcgccttccgaaggctcgccgtcgagtcgctgctgacgcgtcctgcctctcccttgactcagcgcggatcaaaaggcaaagctcgaggccaggagggccaaggcgcagaaaggagagcgccgggcgtgaggatgcatgcctgcctgaaagccgcctcgactcgtctcgccgcccgtcttctcacaatcatcacccgccccccaggcctttcttggatcatggacggccgagccagagctcacctgcctgccccggttgctgcctcgtctgacctacctcgactccgcaccgagcacctctttcacgcgggactcccgacgggccgtcgctaacccgcgccggccgtctagccgtcgacctagggcgtcgccgaaactccggtcgctcgctcgcccggccagcatctcccgaggcgtcgccgctcatcgtcaatcgcacccagcttggcatgtgctctctgcggaggtgatggcaaaggcagtctcgccccggtcaacatgtggggtcctgctggcgatcgagctcggtcagcccaaagctcggccgagggccgacccctctaaaagggcgacctccggcctggctctctcacttcgtcccttgccatcatcatcaccagtcgatctcgtcctttgccctcctctacgctctaccccgaaaacatgagccctaccgttatcttcgtcgccggcgcctgcggtaggtcgtcgcccatcggcttcgcccgtcgcgcgcagctctcctttccagccgactgaccccaccccctgtcggctcgtccttcccctcttgcaacggcatcggcctcgagactgctcgccagctcgcccgggacaccgaggtccgtgtcgtcgctgctgcccgcaacccggctgggtccgaggagctccagaagattgtcgccgagagcgagggccgcgtcgcgacggtcaccctcgacgtcagcagcgaggagtccatcgctgtgcgttcaggccttcccttcaaccccccccccactccaactaaattgacaaccccctcacgctgccttctcttcgcaggccgccgtcaaggcgacgcacaagatttcgttcgtcaaggacaacgcctcgtcgatcgacaacctcatgctcgtcgccggcgtcgcctcggccggcaacactggcgcgctcgactacacgtccgacttcctgcgccaggacatcgaggccaactacatcggtgccattctcacgacgatcgcctttgtcccgctcctccaatcgagccccaagaaggcgccggccaagatcctgctcctctcgtcgatcctcggctcggctggcagcatgaacagcctcggcccgtacgctcacatttccagcggctacgcggcatccaaggcggccgccaacatgtggtaccggaagctcgcgctcgagttcgagagcggctcggccgagaagccccgcgacggcggttgggcggtcgtactcgtgagtgccgttcccccgcccctcaataccctggaccctgagctcaccacctttctccttcatgcagatccaccctggtacgcccaagaccgacatgaatccttggggcgaaattacggtcgaggagagcgcgagcggcgtcatcaatgtcctccaaaagcagatcaccgtcgagacctccggccagttcttcgactggaccggcaagacggtccccttttgagctgcctcgcgcgaccctaggtgccatttcgtcgcctggtccgacctcgcgcgtcagcgcaaccacgtgccgcagcggcactttcgatcgtcagcggacgccgaaagcgagtagatagaagggggcgtttaatcatgaggtggcgtgtcataagaaagacggcgtcggatgggggttggaggacggggggacggggggcgcgagctggaagggggctcggttgatcaaagcaggtcgtgcgtgccggctcgagcctgccggtcgtcggagaaggacgtcggcggtcgagccaagaacactggggccgtcagacggcgctcagacgaagggcatgtcgccggccgtcagggcaaggcaggtgccggagacgaagctcgagtcatggcaggcgagataaacgtaggccgggccacactcggcgggctggccagcgcgcatcgtcagggggggacctccggcggcaaagccctccatctggtcctctggccgggcggccggctggagaggcgtgtagaacgggccactggaaaagatagtaggggcgggcgaccggtcaggtcatgaaactttcggtcggacgggcagatccaagacgtacggcgcgaccgagttggcacggatacccttggacgcaagctggactgcgagcgaccgggtgaagctcaggatcgcgcctttcgttgcggcatagtcggcgaagcctccggagccctgagtgacggcgagagcgcgtcagaactgccaagagcgagaacgagcaagtggggcgtaccttgtaggctgtgacgctcgtggtgttgataatggccgagccgcgcttcatcagcgggacggcgtgcttggtcagcgcgaacatagcggcgacgtctgcagagagtgatggtgccggtcagttgacgggccagaggaagcaaccggtaggaggccagtcggacgcactgatctggagcgtccgctggaccgtgtccatgtcaatctcttggatgtccatgcactggacttgctgggcggcgttgttgacgaggacgtcgagccggtcgccgtacgcagccttgtgcgactcgatgatgtgcttggcctcgccgtcgccgggaaccgagaggtcgcagtacacgatgttgaccttggcgcccttcgagtacttggactgagggagggtcatggcgagcgtcagcaaaggggtccgggcgtaaggtgtcggagaaaagggttactgaccgactcaatctcgctcttgaccgcttcggcgtccttacgctcggcctccatgcaggcgatcgtgatcgaggcgccctcgcgggcgaacatgatggcagcagcccggccgatgccctatgagggggtatgcgaggagcgaccggtcagcatggcgctcgacgcgagtcgactgcgtacacagacgcaccgagtcggcgccggtgaggatcgcaatcttgtccttgagctttccgctgccctcgtactccttgaggtaaggcttgccgtcgtgccaatgctcgagcttcgagtgctcggccttgacgggcatgcgctcgtcgaggcccgggccctcctgctcaaagccgacgtcgggcaggttgtcgacgtaggcggtgacgagcttgccagagtcgatgagctccttgtaggacgacactggaggagggcgagagatgagggtcagtaacgctcaggcagcgagggcgacggcgaaggcgcgagatggtgactgcgggcacacgcactgttcagggtggtcgggtggtagggtcggtggaagatcggtcgagatgagaggcgactgaggaatgtagttcgcgactggaggaggaggcggctgcagagggtggtggtcgaaggcatctcgtcgtcgtcgttgctctcgtcgtgaaaggagcgacggcgacgtcgaggacgcgtcagagtcgtcggagccccgcacccacggcggaactcgtgagccgggagtcgattttggcctcatgaatcccaaaagaccccgtcgtcgggcgtcagggcgagcaagcgactccttcagcccgccgcccagcaagacggcgagaagccagactgacagtatagagatggaagacctcgaatcatgagctcgcgactggcagcagcgcgtgactggcgggcgatgagtttgatgggacccgccgacctgcgcccgacttcatgcgacctcgctcgacggcctcgcccaaccgcaaccctccgacgtcgggttgcgacgacctctgttggcaaggccgacctgctcaccactcttgctgacatggatggacccttcgtcctgctattgatggatatcaccggcggctcatcggcccgactggttcctctctccgttgacggacatggggcgcgcgagcgaagggaccgagctggccgcgctccaacagcctttccgatcaaggcagggcggccgtagcctcgtaggccgcagacggcggaaccacgctggcattgtagcttccttttgatggcacaggcgcccgctgatcctccgctgactggcctgacggcgctgaacttccaagtggggcaggtcgctgcctaaggagatgggagccgaccatcggtctcctccgtatcgtgccggccccgcagggcgagcgacgttcccccccgctgacgtcctctttgcgtcctctcgcttcgacggtccgttctggccgacgacgggacccgggccgctctcgttgaacggcgaaagagtcgcgacgctgagccggaagccttataaggccgcgttgagcgcggcgcccaaggcgccgctcttcctctccttatcccaaccctcctccgcggtcgaagctcgacttttcttccttgacgcccgccagctgccatcatggccgccgataccagcccatcctcctcgcggaccgacgtcccactcgacgaggagaagaacaagctcgccggccaccggtcgttcgcccatactgagggcgccaacgccgacgccagctcctacaagggcggcgagttgtacgtccctcgcacagactggcttgactcttccacggcctgcagtagctgacggcaatcatgcgccgtttacagcattgacgagcgcggccgccgaggtacgcgcgcgcgcccgcaatcgcgcatcagcccctttcttgaccctcgcccttgcagtcttccggacaacgaccgcgccgcctctctaccctacctgggcgcgcctcatccctggcggctggtccaagagatggctgagtgcgtatctgacagaactgccgtctcgcgacccatctgagcgagtttttgacttctgaattcgcagtcccgctcaagggcggatcaatgatggccgccatcaaagctttcgcaggaatatcgatcttgtttttcgggtgaatgcctcatttcctgatccactcgggcgctgtgggccgcctctcagcactcacccgttgtccttccccgcctcaaaagatacgatcaaggcgtcatgggaggcatcaacgagagccacgactacaagcaactcatgggcgtcgactcgagccctccgactgaccgggacgccgctgcgacgggcggtatcgttgcgatctactatggcggcacgttgatcggcgccctcatcgccggcgtcctcggcgacaagattggccgcctcaagtgcatcacgattgcctgcctgcttgctacaatcggcgcaaccatccaggcaagctccttcggcatcacccaaatgatgatcggccgggtcgtgactggtcagttccctccttcgatctgtttcgctgaaggtctgactgacgtgctctcctctttcccgtttatcaggcatgggcacgggcgtactaaacaccgtcattcctctgctctgctccgagctctcgtcggcccacacgcgtggagcgacgctcgccttcgaattcgtcatcaacattgccggtgtctgcgtggcttactggctcgtacgtgccgtctcgtccttctgctcgcctgtcagctacagtcgctgatgtttgacggcggtgtatccaggctttcggcctcaaattccgctcagaccggtcgagctcgttttcatggcgctttccgtgcgctcttcagatcgtgttcatcatcatcatcctgctcatgctgcccttttttcgtgagtgcctgtcgcgggctgatcggctttcaactattgctgacccccgagctcggccgtcctgcagccgagtcgccccgctggcttgcgcgcatgggccgcgaggacgaggcccgctacatcctagctcaatgccggaccagtgatggagtgagtggcagcttcctcgggaatctttcctcaaagcctggcgctgaccattgtctcggtcgcagaacgaggacgccgagattgtcaaccaggagatgtacgacgtgcgtgcgctctggctctcacccgccttacgccataacaaccctgacgtcggctgccgcacttgcagattctcgaggtggccgagcttgagcggtcgcaagagatgagctacatgccgatgcttttcaagaaggaccctcgttcgtttgcactgttatgctgccctcctgcgcggcgttgttgacagcctgcccgtctgcagtcaacatccgccgtcgcgtctggctatccatctgcatccagcgttcgtcgtcatgcctgctttacaagggttcactctgacctaaagctgactggctccctattattacagtctggcaagagtttaccggaatcggtaggttgtgtgtctcgagctgtgcaaatcccgtccagtagctgacgctcctctgtctgcaggcgcggtcacggcgtttgctgtgcgtttgactgattgcctcagctattgacagagcctgatgccccaacctctcgatttgtcaggctacggtcttccggcaggcgggctactcggacgaaaaggccagccttctgtctggcgtcaacgacgtcacttaccttctcgcgtgcgtcgttcccctgccactccttctgctgctatcgcctgacgcccgccaccaccttccagtgtcttcatcgccgtcgtcctcattgaccgtgtcggtcgtcgcaagacgctcttcgccggctctgtcatcgtgcgcgctctggctgcccgagcgctcgtggttccagtactgacccaaaactctgcgctcgctcgacgcactcagatggccctcgccctcttcctggccacggtcggcgctcactttgttccgcgcaccgagggttcgcagcgcagcagatggggcgcgctcgtcacgttcagcatcttcctctacacggcctgcttcggcgctacctggctcacggttccctggctggtgagtcacagctccccgccgcgcttgccctcgtagaaaggccagctgacgacctctgtctttcagtacccgaccgaaatcttcccaaggtacgctcaaccgcgcacagacgagcttccgctttcagcgacgcgaggaatccttcgccaacgcccgctagactgacgcgctatcctttttctgcgtttatcagtttcgtcaggacgaagggctcggctttctccgtctcgggctggtcggttggcaacggtatcattatggtacgtcttgcggctcgattggagagagcttgacagagacctgacacagcttctccccttcttgtttcccagatgctcacacccttcctgttcgctgccatcggggagtacgctttcctgttcttcggcgtgctcactgtcgccacgatcccggtcgtctacttctgtgcgtcgctaccctgctgtcttcctctgcctctgccggccgccgctcgctgaccctttcctgccttctccctctcgccactcagtctatcccgagacggctaataggtcgatggagcgcatggacgtgctgtttacgggaccgctcttcgtccagggccagcagaagatgctcaaggagctccagacgagcgacccagagctctaccacgccgtacgtctgtgctgcgcgccacaccccaatctccgcaagtcgatgtcctgacattcgcctgaacccttcttcgtcacctcacagatggagatcggtgaccacgccacgatcgcacgcaagcgtggactcgctgccacgaagcagaccgagcaccgcgagcacgcgtgagcgttctctgaccacgcctgcctgaccaccccgctccccgtctcctctcatccgccactgtatcttgctctcgtcttccgcttgctctcgatgcctgcctcgctctcgctcgcttgacctctcgatggctgcaagtcatgacaactggctcaaccctccaccatcgtcatcgcccggacgctccctccgcagcgcagacaaggccagccgtcggtcgtcggcttccggccctctgctgcactgagccgctcggcctcctcggtccggacaagcgcttcgccgaggcagaagtagcagtaggagcagccggcccagcagttggctcgaacggggatatggaccgcatgcgggtcgtcgccgactggcgcgtcgacgccggagccgcctgcggtggggaccactgggatcgatggcagttgcgggattggcacggccgaaggggatgacgccgacttggagaaacagatggggcacgtcatccgagggagagtggcgtacgggccgcgaggctgctggcccgacgagccgactgagcctgccttctcggggcaagccgccgccagagccttgtaatctggcggggcgccagtcagcagcgccacgctctctgagagcgctcggcggaccgaggagagtgggccaaggatgatcggaaggtaaggtgtgacatgcgggaggaacgtctgcaaagagtaccgctgtcagctcccagaagccgataaagggcagcggcaagacggaccgccatcgagctccagacgagctgccggttcataaactcgtacgagaccatgcgcgtgagcatcgagcttgaaggcacgagcttcaggccgagcgctcggttgagcagggtcggatacctgtgaccgaggtcgtgctatcagccttgagcggagcgatcgctggcgacagatgaagccactcactggccgtcccagaggaaccagacgagaccgaccagctcggccgccttcccaacctcttcgagccgaccgacgagcgaccagaggcgtctgcgccagctgcgtcgaggcagatccggccaactccggctgagcgcgaatcgtcggaagcgctcaaacagccagcgagggaagagctgcggcgagagaaagaagtgcagcagcagcaggttgcggactagcagtgcggatcaggagacgggtcagctcgccgatcaggtaggtcgctgcagacgccggcacgaggacgcacggcgactcctgctggcagccgcgccccatcggctggccgtcatcatgaggttctggagatgggcgcctggcgagacgagtcggtcccagatgccaaacttgtagagcatcatgctcgtcagaagcatcagctcgggctggagctgaagcttgagatgtggctgcgggaggcgagatgcgacggaggtcagcctgcgtcggcggccggctcgagagcacctcacagaacgacgcacactgaagttattcagcgacgatgagacttgctcggtgagcatgctggagagcgcatcgtcgagctcgagcgagtcgagctgcgacacgcgaagcggccggggcgaagggactatcgtccggggcaaggtggccggcccggcggcgagctggctagccggagcgggaggctgagcgagcgaggagggcatccggccgagctcggatgttgacgtcacaggaagcagacagagaattcctagagatttcgaagagacaaaagctggccggcgtcgggcggtcgggtcagagatggagatcgaggtggcagggtggccaggaagacgaggccggcagcgggcggggctcacgtgtcaagcgcgccgactggcggggtgaggtaggcgaggtcggaagcggcggccacaggagtgatgtgtgtcctggacgagatctatgttgggcaggcgaagctgctgtcgttggggtggcaggtcgtgtcttgggcggagggaaggggagtcgtggttgagcgatggaagtgacgctctcggaggcggctaggccgggcttcggcgcggccgctacccgcccagccgtcggtgcactcgtcgtccaggggcactcaagcgcttcccatctttctcgtcgtgtgctctactgagcgtgcgagagacatgtataggagcatgtgtccgtccaggccgtcccgccggcgagctgatgggcgccggccagagctcaatggccccctcactccttagcgacctgaatgacaagcttgccgaccgtctggcgtccagtcagcgctttgtgggcttcccggagaccgtcgaccgagaaggggtacgtctcagagatgagcagctgcggagggagaaggaactgtcagcgaccatgaaaggagggctcgttgcatgccacgcacccgaacgacgccggcgtcgaccagatcaaacatttccttcgtgtagctcttccactcttcgctcgtgacgatcgcgttgttgagtctgtgaaaggagacgttatcagcagacgtccagtgcagagcagttgtgcggagattcacgtcggccgcgtgagcttccagttgcccttggccagcttggccggcaggatctccggaggtgcgccgctcgcgttaccgactgcaaaagattggaagaccacgatcagccgcctccctgaagtcggcagctcattggaagcaggaaggacgcacaggtcaccaacgtcccctgacggcggaggagcgaccagtcggcctcccacgtcgccttgccgacgccgtcgtagatggctgtaggaggcgagacggggtcaggctagaccagagagcttgagagcaaagccgggacccaccgtgaacgccgagaccaccggtcagacggtcgacctccttctgcagggcgtcagcgtcgccaccgacgacgacgacctcggcgccgttcttctttgccaactcagccttctcgagcgtgctggtcgtgccaatgacgtgcgcgccaaagtggcttgccatttggcaaaggttgaggccaacgccgccggcggctggagagggtggcgaagtggatgaccgagtcagccttccgcacaagttgccctgaggggtcagacgcaccggcgtggacgaggatgtagtcgcctttcttgacggcgtacgactcgcgtaactgcgtgagtgcagtcagaccctgaacgataagaccagcggccgacttgagcgagattgacgacggcaggacctgcaggtgcaagcacggtcagccgttccgctccgacttgactgcgcgcgagccgaaaggaggccgagggcagactcacagcgaccttgtcggccttgacgaccacgtactcggcgtagcagccgctctggtaggctgcgacgtgctggccaaccttgatgtcggtgacggacgagtggacgtcgacgacgacgccggcagcctcctcgccgagcgtgaacggcagcgcgaccgggtacagcccgcccatctgaagcgagcgccgagggaaagcagctcagcaacggctgacaaactgagaggagacaggtagcagctcaccttgtagttgtcgatgctgagccggcacgagagcgaagtcggaagacgtcagctcgcagagcagatggtgagcctcggatggcgcagccgggcagccgctcagagccacgaactagttgatgccggcataagcaaccttgctaagaagcagtaaggagaagaccagcaacagcgaggctaagtcagctgcattgatcggcttaaaggacgagaggaaatgacggacatgaggacctcgccggcctgaacagtcggcaccggaacctccttctgctggatcgcgcgggggccgtcctgcttctcaatctgtgcgggcagggagcttaggatcagcatcacgtgaggaagagcatgctcagcgcttcgcaggcgatttgctcaccaggaggaccttctgtgtcttggggacctgcagggtagacaacgacattcttcggagatgaacggcggcggcggcggaggcgggacggggctggaggctagcggcagtgaggcggaaggctggaaggcaggcgggtcgagcagcgagcgatggaaggcgggctgggatggcgaagacggtcgagcggatggccatgcgatcgtggtcgagagaggacaggagggggggggggacgaagaaaggagctggagcttcgaccagcctccgcgtcttgtagccggcgtcccgccgtcactgacagaagagcctgaccgagcacgatccggcctacgccgacctcgtcctcgtcctcttactgatcaggccttgcctgaaggcgaatggaccgggcaatcggtcagcaggccggcgccgcttggtcaggttccgcaggcccgacgacggccagcgccgacgcgtcggctgagaagacggcaggcgggcagggcggcatcgttacagcgagcagagagagcacagaaggtggaggggacataggtgcggcgcagaggggtcggtctagtacacggagcagaggtatgcggccgaggggcgagatgcgacccctcgagcaagatccaagggggtaccgtgtgtgcccggagtgaggggagcggtcggacagggtggcagcagggagaggcggggggctcgagtagcttgcagcaacagcagcagcagtctgcagtcggctatccgacgacccccggcccgacggcttggtccaacaccctgcctccgccgcaatcgcagcagcagcagcctcccccgccggacgactggctctcgcacctcctccctccagcacacgccccgaccccatcaacctccagcggcccggccccctccaacctctccttcctcgcatcggcgccgctctttgggcctgctctccccccggaaccgacggcggcggaagcgcagcagaccgccggcctagcagacgtcttcttctggccgccgccgtcccctctgcagcagcagcagcaagcggggttgacggcgctcgagacgcatccgacgctcgaccttgggtcctgggcagggacgccttgggctccctttccgcagcagcaggcgcaagtcgccaggccaggccaggccggcggcgcgcactcccaagagcccgatagcagcgccagcagcgacagcaacggcggcggccctccatcgacgacgctgcctttcgagctgctcgagctcatcggctcgcaagtccagcccaagcagcatgagcagcgtgactgggcgctgacgacgacggctgcggccgcggggctggcgccgatgtatgtcgagccgacgccgacgctcgtccagctttggccggacccagaggagcgcaacctcgtgcgtcgactcattgtaagcacggtcctctctcgctcgtgcaacccgctgacgaccgctttgctttcctctggccttggccggcagatgacgcactttctcaagatggtcccgaccgtctgcgcccagcctccgcgcgtcgccttccacctcccgccggccccggaccggccgctcgactcggtcggccagtccgtccaagccttcttccccttcctcgacatcccggctttcctcagcacgccacgccggagctcgaccgcgagcgaggcgctctcgctcgcgtgcatgagcgtcggcgcgatccacctccagtacctccatcagcagtcggcagccgcgttccgggcgcagccggacggcgagccgctcgccgacgtctcgcgcgtcgcctatgagaagtacggccggctcgcggcgtcgttgaacgactcgagcctcgctctgggccagacgtcgctcctcctcagcgagctcgcctcctcgtcgtcctcgtcaacgaccgtcgctggcggcccgctgaaccggcgcgaagacctctcgcacctcctcgccgcctgctccgcctcggttctctcgcgctgcctctcgggcacggcagggcacggcccaacgcttgacctcgccaactcggtcgtccggctcctcggcggcccacgggcgatgctcgaggccgagcaatccaaccgctcgctcctcttcccagagacgacgcgccggacgtcgacccgcaagaggctgcgcatcgtccgctcgctgctcgaggacctcgccgcgtgggagctctgtctcggcttgttctcggagcaggcggatgggcaggcaaagggcggcgtcgcggcggacgagagcatgtccgactggctcttccgctatgcgccgccgccggggccgattggcgggccgggcgcggcgccgccagagggcaaggaggattgggacacagttggtctcctcgttcggacccgcgcgctttctcgtcactgtcgctgaccaagcgatgcctcccccccttggcagctcgctttcaccatgtgcatcagccggccaatttttgacctctgcgtcagggtgagatccttccccggttcgttctccctcatgcctgcccggtccactgacgtcccctgcccctgcccgcccctctccttccttaggtcaaccagctccacgcagctcacaccgcctcccagcggcagcagcagcagctcgacccctcagcctcagccacgccctcgacttctggcagcccccccatgcccgccatccaacgccgagccgaagacctcctactcgagatccgcctccgttcgcgcgacctcctccggagccacccggacctcgcgttcgactcgctcggcgccgaggttgagcagacgagcgcggcgacgctgacgttttcgagcctcgagtttagcctcgcgctcgaggtgcgcgccggctcttccctctcccccacgcctgtcgtctgtcgctgacgcgccctcatcttgaccgggcgcagatctttgttctctttgagattctgggcgagcagaagtcgacggcgaggatgcagacgctcgcgctccacgtcgtcaatatctatgacgagcgcatgcagcgcggccagaacgagttcgggtgcgcccctcctgcctttccctgttgcgagatcctctttctgacagacgtcccgcacgccccctttatcctaattgccgtcttcgacgggcgcaggtccgactggccgctcgtcatcgcgggcacgatgctcgagggcgcgcacgagcgcgccgccgtcaagcgcatcgtcctcagctcggccttcccgtttgcgttcgacatgaacggccgcttctgcgacttgcttgaggagtcggtccctcttggtcctctctttggagacgccggctgttgctgacacgctgctcgctttttgctcgtcatctgcagggtttgggccgcgcacgacgccggcgactcgcgcgcctcatggcggtcgagcaagacggccaactctggcctcctcctcttctaacccacctgcactctacatgcccgtccctttctctctgccgctctgccttgcgcgccccttccttcatttagagctgttgacggggggcgtcgtctcgcccgcgcggggctgaacggccggctctctccgcccgaccgctgcgcatgccggcggcaaggtggcggcagtcgacctgctctctcgcccatcgcctcgaccgtcgacccttccctcattcctacttctcttctgcagacggtcctacgtggcctgcctgctagccgtcctgctgtcctgcagtggtgtggccgggtgccggccatcgttgccagcttgagcggaggtcgacgccccggttgagctgctcgcacgacctcgtctctcgccagcgtcgtaccgcccggtcgagccgcccattcgcagaatgtacgtcctactcccaccctgactcgtactgggcagcctgtctcagccagctagctgcctacattgccgttcgagctgctgacgccctgctcttccctcgccacctcccgcgcgcagcggccgacgctctttcgtcatagccgccctccttgctacctatcctcctcctcctcctgcagggcaacgactgacaaactagagccgagagctcaagcagccgctcgagctcttgctgacacgcacgagctgagacggtcgctcgctcgctgcccgcgggccgtgcaagtcattggtccgcgcgtcgccggcgcgtccctgcgcggtagcgcgtgcaacgggcctcgacgtgccttgcgtccctcacctccggtttttcgacatctctctctctttctctaccattgaccatcgacaggaagggtcatggtcgacacctcggacgcgtcgcaactgggccggccttgtcccagctcgctcgtcggtcgcgcagcgcgccctgctggcctgcttccgggtcactcgacgcgagcggttcccctcccctggtcagtctctcttgtcttttgaaggcccgtcggagccgggggtccccaagagcagagggcgagcagcgagctaggctgatcggtcgtcggcgctcaagacggcaagccggtcatctgtcgacttgcgtcgtcggccgatggagagaagcgaagctgacgccatttcatccggctgacttgacgagggcttacgaggagttggggagttggggtccctttgacgttgctgctggccaaatggtctcgtcgggctctcgggggaagagggtcgtgcctgctgatgcgtcgctcctcgggggtatcggggcgtgccctgggtcgtcacccccctggcctgctgggacagccggtcagctgctcgcgtctcgctcaatggcgttggtcaggaacgaggtccaactctccggggcagtcgaggcaagttggcaatgggggcaaacctgacctgcccagcagaccccagcgtcgaggcccgctatggccgacggcaggctggcacgactcggttcgcacgcagtctgtcagcggaccgacccagcggcggcggcgagcaaaacggcgaaccaaagacgcgacctcttgagccgagctccgaggctgcggctagaggtctcggcacctcgcgcacgcggagctccttttgctggcctgtagctgctcactgctcgctcgcacctccctgcgtgccgatgcccttgccctatcttgctctggctgagctctaccgctgagctcctgcctatccgagctgggtcgagctcgtgcggggcctgacagcttctcgccgcggcggtaactttcgacggccgccgcagcaggccacgctctggattggtcgccggcaagaggctgcgatcgcaagccagcacccctcgtgtttggtagccgagcgccgagcctctgtccggatttcctcgcccaaacccgcctcggccccttcgcgctctggtcgacaggccaaagaggccaccggttcaagcgtccttccctgcccttttcccttctcatcaaccccctcacccacctcaccacctaccattcacccagcaagcagcccgactctccttcaagcaggtcgagcgtgctcttctcttcttcccgacgaccggcaacccgctgccagcgcgcaacaagttccgctagcacccctctccgacgatggacaccaaggactatgagaaggacggccagagcggcgaggccgagttcagcaaggcctactcgcccgacggccgcgagccccacatcaaccccgttcgcgacactgacgagtacgaggctcacattgagctcgagacgacccaccgtgggcttaaggctcggtaagtgcactctcacgcccaagaggcggagacgcaggtctctcggcgactccaccagacgcaatcaaccgggcagctgaccgccttcctcgcccccgccctctgcctcgcttccgatcttccgccgtcgccctcgcttgcagccacatttccatgtgcgtcctcgctcgaagtctcttttccggccgagtccgagcgaatcaggctcggcgcgcctgccctcggaagcattaacaggctgaccaggtcgttgctccttcctatcaggattgccatcggcggcgccgtcggcaccggtctcatcattggttcgggccagggcttgcctaaggctggcccggtcggcatgctgctcggctactcgatcatgggtctcgtctgcttcggcgtgagtcgctccctatcgtcgctccccgcgcgcaagattgggttgctagcctggagagacttggcgggctgaccttatcttcccttgcttacccgcgcaatcacaggtcatgatctcgctcggcgagatggcgacgtacctcccgcacaagaagggctttgccggtgcgtatgccgtgagggtctgaagggccaggacagtcatgctaatcttgctctttgcgcccgcttccaggttatgcgacccgcttcctcgaccctgcgctcggtttcgcgctcggctggaactacctcttcaagtacctgattgtcacgcctaataacattgtcgccggtgtcgtcgccatccagtgcgtcggaggtcttgcgagtgtcatcgatgcgcacctctactgaccgcgcattctcgtctcttcgccgccaggtactgggacaaggagaagaagtacagtgcgtcgcccgtcttctcctgctcgcctccccattcaaacctttcgctgaccgctgcctcttatctcgctagaccccgcgatctggatcacgctcatgatcggcgtcatggtccttatcaacctgctcggcgtccgcgtcttcggcgaggtcgaggtgcgtcctcctgcaaagaaagcgctggcaggcgagcggcagctgacaagtccctttcttcccgctcgcagttctggctctcgctcgtcaaggttcttaccctgaccggtctcatcatcctcggcatcgtcctcgacctcggaggaggacctagcaaggaccgcatcggcttccgctactggaagagtgcgtctcgctgcttttggaaggaccgcagcctgtgcgcaagaactgacccgagcacctggcctactttcgcagccccgggaccgttcggctactacctgcttggcgacactccggtcggcactttcctcggcgcctggtacgctttccccaacgcgctgtttgcctacatcggaaccgagcttgtcggtgtcaccgtcggcgagtgcaagaacccccgcaagcaggtccccaaggcgatcaaggtgcggcccctcgcacaaactggggtgtcggctggccgtctgactcttctcgtcgcctcctgcagagcaccttctaccggatcctcttcttctacatcggcggcatcatcgtcattggctggctcgttccttacaactcgaagctcctcaaggatgccaacagctcggccgccaacgccaacgcctcgcctttcgtcgtcgccatcatcattgccggcatcaaggtcctgcccggcatcatcaacgcctgcatctgtgcgtccctttgcctcaaacgactcgccctggcaatgcgctgacctctgtctgtttccgccctcccacagtcctcttcgtcttctcggccgccaactctgacctctacatcggcagccgcacgctctttgcgctcgccatcgagggccaggcgcccgccatctttgccaaggtctcgaagcgcggtattccttactactcgctcgccctctgcaccctcttctgcggccttgcctgtgcgttctggttggctctgtcccttcgatcttcgcgagcggtgactgaccctcttccttccttatcttttgcagactgcgcctgcgccacctcggccctgaccgtcttcaagtacttcgtctcgctcatctcgatgttcggcggcctcacgtggctctgcatcctctggtcgcagattcgtttccgccaggccatggccgtccagggcatgagccgcgacgagctcccgtggaaggcgttagtccttcgtcctgctttcgctctcgcgtcgaccgtcggctgacactctgctcctttctacagtcccttccagccgtacggcgcctggatctgcgtcgtcatcgcctccattgtcatcctcttcaagggctacgacgccttcatcccgaccttcaagccgatctccttcgtcacgtgcgttcctcgagcccgtcgaggacgtatccggcctcacactaaccgcccttcgcctttgccctttctcagcaattacattggaatcccgatcttcttcctgttctacatcgtgcgtctcttgccgcctctactgtcgcttgtgtaccgaccagatgctgacctcctcccctttgcctctacagtcgtacaagctcatctacaagagcaaatgggtgtcactcgagagcatggacctgatttctggtaagttacttccgcccgtctgtttggcctctaacgatcattgctgactggcttgcctcctttcccggaaaataggcgtgcgcgagatcgacaacaacgaggctgcactgcaagacgaggaggacgccgagctcgtcggcaagaacttcttcatgcgctggtggctccgctagacggcggacgcacccttgtcgccttccggtccctctcgctcctcgcacgactctcacctccgggccgctcaccgtgccggccgcgccctcgctcgctgcaccaggcctgacccgttatacttctagccacgcaacctcgctcctctctgtcatctactccaaaacactcaactttgtacgcgcacgggattcgtcactctcgccccgcgctgccagccttctcttttctcatcccccctcgacaccttgtagaaaaaggcccggcccttgcctttccctcgcacctttgcttcccgcgatctacatgtgactagacgcagacttcccctcgtgccgtccagtttgaggtcgactgcttcaagctggtcgtgcccgcatcgaccggcgaacgctacctcatcgcctccccggccctttgcacacgaccttcaccacggggccttttgccacgccggccgcacctcctcgctgcactcatttttgaacctagctcatacctgaccctacggtcggtttgattcatgacctgcgctgaatatcgccctcgaggtcaggtcctccatctattctgttgagtgttggtcgcctctcgaacattagggttacttcgggctgcgccttgggggcggccgcgctccgctggcatccccttcctctccgaagcgaccctccccctctcgcagtccaccaacacataccaccagcttctcgacgatggcctcgtccgtcaggcacctctacgctcgtacgtccacgcgagatttaacagccctttgtcattagatcctgaccttctcgttcgggcagccccggcggatgacttcctcttcctgccgccccagcttccccacgcctcgggctcgaacgcctcggcctcgacctcgtcgtcgtcgtcatccgctcggctcggctcgacctcatcgtcgtcgcccgtgctcgtcctgcctgaagcctcgcggtcagcgtttggcggcgtcggcctcctgggcgagggctcgtccgatgcgagcttccgggcgacgcgcgacgcgctcctgtggtcgctcggagcctcgttcctctcgagctttgtcgctcaaccgtttgagacgggtaaggtgctctctcagctccagtacctgcctcgacgatcgtttgcgaccctccaggaggcggccgcccagcgggccgagggcgggagcggcacgcccgaggtcgaagagatgccggacgacgacgacgacgcccaggcttactttgaggacctcgtcgccgttgccgcctcgaagccacggacgacgtcgaccggcccgaccggtgaccaccggcagacggatgccgagggctacgtcctccggaggggcagtgacggcgacgagcctcgcgacgagtgggtgatgaagcgcggctactcgggcgacgggccctgggccatgacgaagcgtctgtggaacgatgaggggcccggtgcgccatggaagggtacgtttagcctgacgaggaggcgctctggtgtgggcactgacttggacccgctgctctcgtaggcctggcgctgtcgtacctcctgctccagctgtcgtcgaccctgccgagcttgatctcgagcacgctctcgccaatgtacacgacgaacccctcggtacgtgctactgtcgccgaagtcagaggctctcgtatactaacctccccccttgccgccatagttcctcgcccggccgacgcacctctcgacgctgaggtcactcttgccgcccctcttctcgtcgacgctgtcgacccttctcctctcgccgctggccatgcttcagacgcggcttatcgctcaaccctcgcaccgcgtccaccggcactttgcgtcggccaatcccttctcgaatctccgccaactcaagaccgaggagggcggttcgtggatcgggctctacctccacccgacctatcttctcccggccgtcctcgatggcgcgctcaaggctgcgattgcgctcatgacgccggtcgtcatcgagcaggtgtttggcttcaatccagttaaccacccgctcgcctatcgtgcatttgaggcccttttaacgatcggctcgctcatcctgacgctcccggtcgagacggcccggcgccggcttcagctccagtcgacccagtcgctcccgggcggggcggcaacctcgctcaagacgtgcgtccagacgcggccaaggccgtacgccggcgtcatcgactgcgtctaccgcatcgtcgccgaggagtcggtctcgggcgccgacggctggtttggcggcgtcaagcaactctaccgcggctttggcctcagcctgctcgcgacgacctcggtcctcggtctcgagggcgccctctggctcatgggcggcggcgagggcctcgtcggcggaggtggcgaaggatggaaggagatctgacgacgactatccaggtaaaggggtcccagttgggggttttcaaagtgtgagcgagatcttgtcgaatcgagaaccttgcccactggaagcagacgacgtcacccgattctgaatctgccgcctaaccgaggggtcaatcaggcggttcggatggaatcgaccgggggagggtgggtgacgcctgcagctgagttgcctgagttgccgcctgaagaagacgagggctggggctcgaggcctcggtcgtacccagggctatgaccatagcgagcgcaccagcaagagaacggcagaaccctcgttcttcgccccgccgcccttccccccgtaccccgcccttgtttatgttcgtaagcttatgttcgtaagcaaagtcatggtaaagagagagccatttagatagcctcctcagtgcgaagcttggcggcagcgttggtaacccttgttgaggagggaggaaagcaggatggaggagagcaggatcgggaggagcagaatcaagagcaggacgaggagcaggatcgagaggagcaggacgagggggtcagctgtagactccatgtcgggacagatgcgggtagacgcacttgacgccaaggaccttggcccgggcaaggatctcaatgcgcttgcgcgacgagacggcatgggcaatctcggcggcgaagcgacctgcgtgcatgagcagcaggtcgatctcccgggcgttgtggacaaggaggaccttgtggcccgacggggtcatgtgccaggtgaggtggttcgatccgtaactggtggtggatgcagccggcctgtctcgcgtactcatttcgttctcgctcctctcccggtcaagcagttgccttttcggggcgcggctggccgcttacgtgaaccctcgacgaaggcagcaacacgatgcactgaaagtcgcttctcatcatgtcatcgcatctgccccgccctgcgacctcaggcaacaaacatgctggccaagctgcggcggccttcgccctccttgacagtcccgccaccgcctcggccgatggtcgtcccgccgccgagagtctttgccgtgccgttgccaccgtcgaggaacatcttgctcagcggccgctgctgcgagcggtcgtgctcggcccggcgcgtgcgtgcggccgacgtgtggtggagcgagcggatggccgcatcgagttcgccggcgccggccgaaggcgcgccgaccggaacgagaagcttgccagtgctcgatgacggaggctggagaccggcagcgtttatcgcctggccacgcgagggcggaatgccgtcgacctgacagagaggcagggtggaacgtcaacgtcaccgaggcgaggagaaagagggggaaatcgaggtcgcacccgcttctgaccagccggcggcgtcggctttgttgcgagatgctttgtgacctcggcggccgcagtctgcagtgacatcgagaaggtcaagaccatactgtcatcgtcgttcgcggctcagagggtcagcaggtagggacgggctgggcgacgagacgggctgcgcacccaaagaagtcctccggccgggtcgcctcgggtccctggacctgctcgccaaagtaggtgagcagctcgtcgatctccttgttgacgcgctggcctagtgcctgtaagcgcttgacgtcgggctcgacgcgcgtcacaaaggcgtccatgactggcgcaaagcggtcctccggggttcgatcagcggccgccaggacgaccgtcgtttcggcagtgatcttgtcgacgcccgagacgagctgtgcgaccgactggctgacggtcgcgacgtttactgccaagcgtgatcacgtcgagatcagtagatgcgcgtgggtaggcggatcacaggacgaagcagcaactcactgcgcgcggcggcggagacgctcggcatgtcctcaatgaagagcgccaggccagggctcgtcttgacgatcgttcgcgcgacgaaatggagtagcgtcgggcagtctgaccgtgccgtccgggtctccctcagcttgagctgtacggccgagcaacagaggagcgtcaggatggctgcaaaggaagagaagcagtacaagggagtcacgtacgagggcctccatcgcgaagccggatgcgccgccacggtaggtcgccgtgttgagcgcgttgccgatgcagagaacgacctgcggtgaagccagagcaagttcagcaaccgcttgagatcggcagcgcgaacgagtgtgccgcacctgaaggaccttcttgaacttgaccgacgagcggagctcccgcgtcgccgacgccagcttgtcaagatcggggatcgtctctcggaggtcgaggtcaaagcgactgcggaatagcatgcactcaagtcgtgtctgcaggcgcggtatgcggccaatctgcgacaaaaaaggggacggtcagcagattgaagccgcatcgcaggcgacgtcactcacctccttgaagtagaggtctggtttggccagcttcgagacgtcctcaaaagcggtgatgcggctcatctggcaacgggcaatggaagtcggtcagcagagactctgacagcgcgctcgcaacgctccctaaattgacctcctctgccgtcggcaagagccggctcaggttcttgagatcgtccaggccgagcgtttcgtcgtcaatggcgaggatcgcctgcgagaccctcgggatcggaagcttgagcttggcgagcaggatcccgatattgtttgagcgcgtaatgtcgagaaaggtgatggcctgcggccgccgggaggacgccttgttcgaagcaggcgctttcggcggcgccatcgagaaagtctgctcgagctcgaggatgtcgagcgcgaggatctcctgaggcaggtcgttccagatcgtcgcctgcacctcgtccgaggccagctttttccagaagaaaggctggagcacaggtcaagtcagcgcctgcacctctcgaatcgagcgcctgagaactcttaccttgagcttttttgatggggcggcagcaggtggagcccaaggcagcgcctggggagcgaccgacttgctcggcggtccttttcggatgccggccatcaaggccgcccgaagatcaaccgaggggccgacagcggccttcgcctcgggcacaggagaggcgacagccgcagcagtcgatggcgaaggggcttctgacgctggtgccggtgacgttggccgacccttcggcacggcgtctgcgccgactgccggtcgagaccgtaaggctgccatcagcgcggctcggggatcaggcgctgtcatcagagatgagccaggagcgtccttcgatacgggcgccgataccgaggtggacgccatggcgctcggcgtctcggccggggccgttgccggcggccgagccggcctcgcccgaagcgcactcatgagagccgaccgatcaggaacagtcggggccggggtcggatccgagggaggttgcacggcggtcttcggctgcgaccgaatcgcagcaaagagggtcgatcgcacgtcggccgatccccctgagggatgcgacgtcggtgttgctgctgccgacactttgggcggtgcgggcgtcggcaagggcgtcggcaaggtgagagacttgccggcgtccgaggctgaaactgcatcggcgccggtcgacttctggtcctgctgctcatccgccgtctcaggagcagtggtcgatggccgcacagcgctcggtggcggaggaggtggcggagcgacacgagctttgaagtccttctcgtcctggagcgataccgagctgcgcgaggcccgcttacaaggcgccgcctgctgccggagctgctcgatctccctttgcaagaagcgaatctcgccctccctgcgaatgagtgtgttgatgacctctgtcgcaaggacgtctggtcgcgcgggatcgatctgggccgaaacggtgcccgtggactcgtcggtctcgttgagagcgatgaagcgcgcgtagaccgtctcgagagcacgtcgtgtgaaggcgagctcggcttgccgctgctgcacctgctcttcggcgaggcgtagctgcagaggatgacagcgtgtcagcacccgtttctggcggcaggagtcgcagctaactgactttggcactcgaggcctcaagctctaggcgatgctttgcgtccctcgcgcggtcgcgctcccgtttggctttgctctcctgttgggcaccaacaggacggtggtcagcagagatctgaaggagcagggcggagagtcaagcgtactgtctttgagccttcaccggcactcttcttgccgagccggtcaagatcgattcggagctgcacgagctccttctccttctggaggagccgcaggacgagtccttggtgagagacggcctgcgttgggtcgagcagtggctgaggtcagtcctcctcacgcgcgcagatgtgtcagagcggtgggacgagacctcagtgccgtcagtctccttggaaagattcgaactctgcagaagcgtctgccgagcgggtcagcttgcgtcgaccacgagagagacgccggtacgcacggatccgaagctcgccgagatcttggccggcaactctttgaagaccgtctcttcgatctccttctggcggagggcttccttgagcgaccgcacctgcaggttaggcgcgtcgagtcagccttagcgcagaggtctcgtcactgaacatgagcgcacctcctcatgcaggccctcgttctccgaccgtgcgacctctaggtcagagccgatcctcttgggttccacgccaccgccgagggctgacgcgatgtcatgaagggcctgccgccattcagaactgcggatgaggttgtcagcgcgtcgtctgaagatggaagtcgaagagctgaagcggacatacgagtcgtcgagctccgcaacgtggcgaccgcaagtctggagcacgttgaggatcgtgtctttcgtatagctgatgcgcggattgggaggcttagtcagcgtcgaggtccagcagcaagcgcatcacatgagcggccacttacgagtcatcgtcacgccgcacaatataaatgatgctgccaaggatagccgagactgtcggggcgagctcatccgctgcgctcagcaactctgcgagcagccgaaggcgctcaagtgtgtcgctcagatctgggctgctcgggtccgacgcaacaccttgagtgagctgcagcagcaacgcctgccggctgctcttcaactcgtgccgatctcgtgccgcgtcgtccttccagtcctcgagacagtcgacgatgcgctccggcggtagggagtatcggatggcctgccaaaggaaagaagatatcagcaggagcgaccaacgactgcggatccgtgccagtgcacgcacgaccgactgttccttgaggcccgaccgctcaaactcgtcgcgtaaaaggactctcgcctcgacgtcaacgacatcagcggcgcagagtcgtccgatgaagagcagaactgcgaagcgatgctcgtcgacggcgtacgctttctcggttccttcccagtcgtcgtgcaagccgagtgagtcgacgagtcgctggaagcggaagcggtcgccggtgagcagacggccggcgctgaaggcatcgagaacgacggccgtgttcagaacgtcgggaagaatggcgaggccagtgagaagcttggcaagggccgtcccgaccttgagcgatggcacgtcgaacgcaagcgtcaggaggctcatgagctcggcgtcagagatgacggcgctgtgagtggcctatgaggcgcagtcaaggataaagtcagccgacacgacgagcgagggcgacgagggatctgaacgcacgccgccatagcgcatgaccgactgaaggatgcccaggatctcgacaatcgactgcgaggcgagctcgccccgctcctggatcggaggccgaactagccgcgcaaggaccttgcgaagggcctcgacacccctcagctcgataaactcctcgcagatttcctttggtgccgacgccagcgtccggctgagcgagccgagagtggtccggatcttcatgttggtggtcgttctggcgatgaagagaaggtcagtcgaggaccggcccagcagcaggaacaaagcgccacgcacgagagagaaagctccttgacggcgccgacgatgtaagggtcgccttccgtctcctttgcaccgctccaccaggcactccagccgcccgtgtcctgcctggctagcggcagcggtgagggctcgtcgtctgggtcgccccagccggccaagctcgcaatcgagaatcgctttgagccgccgcttgccgagctgccagtgcgctgaggctcgatgcgctgtgcctcgccgccaccgccggtcgtcttgaaactcgagggaggggtgccggcgagcgacatgcgtcgactctggacggagctggctcgcgagagggatgcggtcgccgaggcagtgctcggccccgtcttggagaagagctcgttgcgcttctgggccggcatggccttgatgcgcgcctgggcttctggagatttgacagcaaagcgatcctgttgagtgggatggccagagttagagtcagcgtctgatgtcgagacgagccgcccagcaagggtttggccgcacaaagagcgcttgccagtgctcgtcgtcgtcctcgccgttctcgacgacctcctcgttgttgctgtctgtcacggtgccgagcgacaccggtgacggctcgatgatcgggctaggccctgtcactggctcagagacgctcatgcgatcgatgccgctgcgtttcttgagcgggatcggccgggctggaggtgccgccgtctcgggctcgtcgggcacggctgcagctgggatcagcgtttggaggagcgatccgaacagcgagtagcgcttgctggacccctggttggagccggtcaagtcgggtgccgtgcgctcctcctccactgctgcggccgagtgtccgttcttgaccgtcgtctcgtcgttgaagcgccccgtcgagccatcgagactgggcgttgctgcgacatcaggacgaggagagcggaggagccaagagtccgggatgcagaagcggtacgtcggcctggctaccgcaaccgggaagggaggctcgtgcagcggccggttgagaagcgaggcgacgaggacgtcgggcttgaccgcgaggccgcctgcgagcgtcaagaccgatctcagtcagtgcgaggaacgcgaccgagatctccgcaagaccactgacgttctcgttcctgcccgtccgcccagacctcttcgatggcgtactcgacaggcgtcccaccgccccatcggtccctgccacaactgcgcgtctcgcctccgagcgtgagccggcggatcaggccgtgtcgctcgcaaaggtgctcgacgagtgtctctaccgtccaccagggtaggcagtagacgatgtgagtcgagccgtccgggatcgaagggatgtggtcaaagcggacgaggaggggagatgtcgcgagggtcagcgccagctcagccggaagctgatccggcagcgggctgtcgagctcgaggcgatctgtggccatcgagcgtggcgagagcgagaccagccggtcagctgaggtcgcaacaccgagctcgccgagggtcagagctaggagacgcaccatcccagtgctgcggcacgtcggtcgcttcgtcgaggcctgagcccgaggaccagccgaggatggtccaggtcgggtcgtcgtcctcgagctgggcgagctcgccccggtcagcctttggccagttggcgaggacggtcccgaggagagcgcggccggtaggcgaggtcgtaacggccgagccgagctcgagcgtcgcggcctttgatgcgtcagacggaaggcggacgagcggcatacctgctgcgacaggaggcatggaaggtgaggcggcctgcgcagggaaggatcttgggtcttggtgcggtcgttcgtgacgctgatgctggatggtcagcagcggggagctcgagctcgagcccccctatctcctttctcctctccgaccggcctccttcccggactcaggggcggcggcggcgcaacgtggcgggccacaaagggggggttgagtcgtcgatgaggggcgcgacaggcccgcaatcgcgcgtgcgctcggacgtccgctttcgcccctccgatgcgtacggtcggcgcctggccaggatgcacctcgagcagctcgttcagacgattgaaacagtatcgaaagcaccctcggtgagcgacgcacgcacgaccaggacgagatcgaggggaagaggggggggggggagcgaggattggagggcgcgcagtcgaccgctcgccttcgctcctcgctacgagtacagacatgacagacaagcgaggcggataagagtctgacactctacggcaggagatagatagaggggtctggctggcctatgccgctcgggatgcatcaccttcgccgatgccggcctcgggggcctccgaggcacccgccaaggagccgtcgaccaccgcagcctcgtcgtcggtcgccggggcgacctcgacctgtatgccctcagccggagagttgacgagcgtctgctgcagatcctccttgtcgattgtcggagccggagtcgagctcgcgctcctggcaccggtcggtccggccgtgctggcaggcggcgaagccgctgcggccgcgcccttgttcagcgcaaagaagttgaagcgcgacaacttggccgccggtggcggcggtggagacgtctctgagacgagcgactggctgtgacttggggttggaggggcaccgggcggggcggagggctccgaaagcgagacgccgcgcgtccaagacgagatgaagctcttggactgcggcggcggcggagggcggcttgacgtggatgcaggctcatcgaggttggaagccgcggtcaatccggcgaccgaggcgttcgaggcggcatccttcgggaggggaggcggaggcggggcagcgactgacgatccgttggcagggtgtgacgccggcgcgcgcctgaaccacgacgagatgaccgaaggcttcggctcctcggcaccggcccgctcgtcgtccgattcgccctgcatatcggacgggagtggaggcaggctcattccctcgagctccttttcgcgctcggcctgcgggacggcgataaactcgcgcagcgcgcgacacgcggcctcgctggcctcccgcgcgagtttcgacgcggcgagctccttgcggagagcctgaacttcgagctggagctgagtgagctcctcgggatcgacgatagggaccgtctcggccgacgagacgcgagtcttcatgccgccctggaggcgcgcgagggcttgccgacgggcctcctcgggcgagacgtcgtcctcggacgactgcgagatgtcgacgtgcggcaggtcattggccgtgagcgatgaccgattcgcggccgccttgacgtcggcagtcgccgaggagccaccagcgccccagctgctgaaaagcgacgtgatgccgctcgtggcgccggcggcgggagggggcggaggagcctgcgacaggcgcagctcgcgcaggccacccttggtgacggtcggccgcgcgggggcgagcggcgcaccgggagcgtcgccgccgtagagtgcgaagccggaatccgagacggacgatttcctgcgatgatgcgatcgctccggccggttggcgacgccgacgccgagcgacatgcgcttgtcgcgcgctgaggtcgtcacctctggcgccgggaggtgggtcgcagaaggcgtccgcgcctccttgtcgctctgaagacgcatcagtgtccggcgcgcgtcctcgaggctgctccgaagtgtcgagatggtcgactctgaggcatcggcggcggccagcttgtcgctggcggccgtcttgaagtcgcgcagctcggccgactcttcctgcaggtcggtcactttggcctggagggcggccatcgtcgattggaccgacccgagcgactcaagcagcgagtctcgtgcggccgtgacctcgaatactttgctcttgagggcctcgatcgtcgccttggcggcttcgaggtcagcagacgggtcgggcagaggggttgccgccggcgcatcccctgagccggaagcttcctggccggccgagggttgatcgatgacctcctgactcgaccgggaacagcagcgggaggtcagcggatggcaataaggttgcaggatgaacgcatgcaacacacctgtgcgtcgttgttgccgtcctgcggctcgtgcgaatctgccatgttggagccggcgactttgggcgaccgagctcgagttgtcgtcgagctaagagccgatgcgagtttgtcgagccggagcctagagcatgaaccgatttcgaccgttcgtctgctcaagactgagtgaggcaagatgtcagtcgcgctcgagtgaagcttgcggcgagaggcgagcagaggacagacttgacgactgtggggtgggcgaaggcgggggggggtgagacagggtgggcgcgcagaaggtccgggtgatggggatgcaagaggggaagcagtaaggaagcaggcgtgccagcccctacctacatgcagaagccctctggcgggccctccggctccttctcgcacaggaactcgggcacggcgtcgagcacctcgctccagaagcgctcgacgtagccatccgggtagccctggaggtcccagccgagcgagaaccagagccggccggcaaacgtgtaggaaaacatgagcatgccgcccggccgctgccggacgccaaacgtcaggtccgaggtgtgcacctgcgggtaggtcgtgtctgccgagggggcgcgcgcgaagcacgagggctcagcaggcggccaacgtgaagcgagctggcgagagacgtacagtttgaaatggcgtctaggttaccgaggaacgagacgcccatgagcgcctgctggggcgcccggctcgccttggcctttgcctcagcaatctgccgctcgcgctgggcctgctcggccgagccctcggtggcggaggcagccttgccgttggtgtcgtcctcggtggtggtctggccggtcgcctgcgcaaccttgagcttgagctggtcgacgccctctacgagcttgtcgacgaccgacgcctcctgcccgccctcggtctttccctcggccgccgccgccgccgccttcttcgccgcttgggcgtcgtcgaaccgcgcccagccgatcgcctgctgctcgcgcacgaggctcatcgccatcgccctcgtcactaaaaacgagctcttgacggcccggtgcgtttggcgctttgtgctttggcagcgcagccagaacgtctgctcgtcggtcagggacgggacgaggaaggacgggaggacgacgttgtagtagccgacgcagaggtggaaaaaggacgaggcggccggcttgggcggccggagggcgccacggaggttgatggccgagtacatcatgctgccgatcgaacgagaaagtcagttccgggcgtctccgcgcccgccgacaagaaagaaggcaaatcgcacagcggcatgtggttctcggccttcttgcgccgcgcccaagcgatgttgacgagcgcaaagacggcgttggcaatcgtgacaccgtgcgacttgcacatggcaagaatctcgcgcgtcttgtccgggtcaatgacccgcgtgtcgacgaacgtctggcgctttgccgccgggttgggcggggcgcggtcgaaggcctggccgccctgttgcgagagcgaagtaagaggtcgtcagcgacagagcggagggggcgcgagagagggaagaggacggacgatctgcttggcctggttgttcataaactcgaccttggcgaccgccttctggaaggccccggccgagcgggggatcgcgagccgcttctcggtactgaccgggatcgggttggcctgcagcaaagaaggggggagtcgggggtcagtccactctggcgcgaagatagagcgagtgtgagagaatgggaccgcacgccagcggcgacgcgggcgtcaatctcgctctggacgagcacgcttaggtcctcctcgcccatgtcgctcgcgcagagcgtcataaactcgttggcgaggaccgcaaacgacacgccgtcgccgaggaagtggccggcaaagaacatgaactcaaagtgctcgttcgccgggtcttgggcgttgaacggcgacgaggggttggggaagatttcgggcgtgtcgagcgaaggcggtgggcgcgagacgaggactttcgcgaggaggtcgggcgagagcgtgcgcgggccgttgaggtagcggtcaacgagctctgaagagtgagggagggaatggatcagcgaggctgaagaagatgtcctgtgcgagcctgcgaagcctccagtgcgagcggtgtggaacgtaccatcctttgtcttgccctcggtgaacgacgccgcgccctttgcggccaggacggcctcggccgtcgtccggggaagctcgtacctgcgagcgagcgcggcaaacgtcgagatgaggacgatcagcgaatcgacctctcggtcaaaagcaaaggcaaagcgacgaccgacgcacacaaagtagatgtcgtcgagctggcgcacttcgacccggctcgcaagcagcgggtgccggagcctgaggagcgcccagacgagcaggacgcgcgagggcagaaggatctggggcgggcagaagagcttgaggtggaggtacctgcgggcggggggaagggggcgggagtttcacatgcgaccgagaggcgtcgagggcggcggcgaagaaggggagcgagaacggagcgtcagccatctcggtcgtctgtcggttctctctcagctttgctagaggtcggcgaggcgagggaatgggcgggcatctctctcggtcggtcgggcaagacgcgtcgccggctgccgagcacgcgcgcgagagcgagcaagcacgcgccggcccgacgagaggcttgcgcgcgcgccccttgcctccggcccgagcccaaagccaaagcaagtagcaggaaggagagacagagaggagcccgggacgtacatgtcgttgacgccctctgccctcgacggtaaaaagtacgagacctcgttcggccccatcttcctctcccaggcctccctcgccgggccctgcccctccgcgccgccgatgagggcaaagccgtgcgagtcgagcgagggcgagggcggggggttgagcgactgctcggggaggccgaggatgaccgaggtctggatgtcggacgcggtccgggcgtgcgagtaggacatggtgctggaatatagggtgatcggcggaaggaggaggtcgtcgaggtgtcttgccgaaggcgcgtgccagagcccacgaccctcaaaaatgcattgtaaaccctctccgatcgcattgagccggctggcttcccctccgatcgacctcctcagcccaccctcgctccttaccctcaccaacacccgcaccaccatgtcgctccgtctcgtcgcccgccgcctgcccaccgcaaccgccgccttcacccggcccttcaccacctccctcggccggccggcgcttcctccctcaaccgaccccgccgcccagccctccgcgaccggccccccagggcacaccgcttcgccagacccgtggcctctccccttcacgcccgagcacatcgcctcgacctcgccctcaaaaccgaccaacccggacgagattgagctcaagatggagccgatcgatcggacgtacgagacggacctcgaggtgaccaagaagcggctcgtctaccaggcccgcaagcgcggcatgctcgagggtgaccttctgctcgcgacgtttgcacgcgacaacctcggccggatgagcgcggccgaggtcaaggagtttgacgaggtaacgtccctttcttactccctcgtcgcgagggcgtcagctgggggctcgctcagatccgacttcgtcctctgggctgacacctccaccgattcccgatcctctctctctctttcatgatccagctgatggacgagaacgactgggacatcttctactgggccgtcaaccgcaaggagcccccaccgaggtgggccgactcggagctgctcgagaagtccgtccttgcctccttcccttcgggccctgtctgccctgcccctggctttcagggcgctgctcgtttggctgcgcgcgcgcgcagtcgatcggagatcgacgacgccgccgccgacgacgatggaccgaccttctgctgacgactgaccatcttcctccccctcctctgtcccttcctacccgcccctcctgcaggctccgcgtccacacccggaacgagggcaaagtggtccgtttcatgccggacctcgcttcggcgaagcactagagctcacgtctcgtttctctactggtcgtcacaccttcacgcgagaggtctctcagcaagagcgacgtcgacgcgccctctctatgtcaatgacgtattttagtctcgtctttcagtcggggaagactacaaggcgttcatgactcgctcgcgcggcccagggccgttcttggcatatgctacgtgctcagctggtgaaggagaggaggggaagagacgaagcgaggggtcagcagatgcataggtcgagctgagggcgggtaagaggcgtgcgtatttcgtcttctcggccgctgccacccttcatcggctgatcatcgacggccgtcgaaggcggcaggacgtactgcagcgcgggaggcggcagcgtcggcttttcctggattgaagacgtgtgctcagcagactccgtcggccgtccgccagcgtctcgttccgaccacacagcagcagcgtcagccgccaaaaaccggttcggaacgcttgaccctcttcgcaactggcggcggcggcggctggctgggcgccttgcgccgctggaggtcgagcccttgcaggatcgggtactcagccgtcgggccggcgtcacgcgggatcttcgagaaggagatgcgaacgtcggacccgggcgaggccttgcgcttggcggtcgcgactagagcgatcgcctgcttgttgacaggtagcgacggcggccggtggggcgcactgcgaagtgcactggcgtgctgggcggcctcgacagctgagccaagcctgccttcggtcgtgccggcctccggagagggcgacgacgacgacgacgacgagtcgacctggatgacctcttctgacgaaggtccggccggaacgagtgccgggccataggcggcgtcgaacgagcacggaacgtcctgcaagtcgagtatatgcgccagcaccggcgcgtctgccgccaacttgagcgtcggcgggtcggcgctggtcggtggcggcgacacggacccggacgagatgtcctctgccagtgtcggaacgtcagacttttcgagcggctcctgtttgagcgaccggcggcgcttgagtcggcgaaggaggtcctgcgtcgcatctgaccggctcgcgagaggtcttgccgtcaggtcgatgacctcgtcgttatctgccgccgccaccggcccctcctccgccagagctgctggtggcaccttgcgcttcctggtcctttcgcctagatcggcagagccgggcttgcttgtcgccggacgagaggctgacggcggtggtcgccaccagccgtttctaccgtgaactgagccggttgcgatgggcaacggcgctggtttgagtgcagcgttcgacgaaggagcgacgggtcgggcgcccttcgagcctgacgacgacgacgagtcggacgaggctgcggctgacgacgacgactcgaggtggctccggctgccggctgcctcctttgccttggtcctgcaggccatcaaagtccgctcgggtcagagcaggcacgagtgcgaagagacatgagccgcgcaccaagggttgtgcttgacgacaagcgaaccctcgtcccgggccgagaggtcgagttgctcgagctgctgccgctcgagcttgcccgcgtcgagggcgtcgtcgtccgtgcccggactgtcgtcgtcgtcgtcgtcgttgtcgtccgagcaagccgcctcctgcaggaatgagtgggcccagatgttcttcgagggaggcattagacgagagccagagagtggtcggtggtcagtcgaagcaggtgagcgtcgaagcggggagtcgttcagcccgtcagcgaaggcgcgcagcacaatgtcgcatgcatgcctccgtccccttcagaagatcaagcggtcatgcccataaacgggcgagagcaaggcgggatcgccctgtcgactgggttaagggcgggtcgctcccagaattttaagcgccgtctgcggcgctcgagcccgtgcggcgggaggaaatcaagaacaagggggagggaaggaagaccagagggacgggagccgggcgaagaggggtgggaccggctgagtggcctagacgacgagatactcgtccgtgacgaggaccgtctcttgtgagaacgagacgtcgtgaccgccctcgaccagcgatgcgctgtcgacctaggaaaaccgagagagagcgggtcgtcagtgccggtgacagcaacaagctcgcagaaacgggacgcacctggacctcggcgagactgccggccgagacaaagccgacgcggacggggaagaagctgtcgacgtcgtcggtgccctcgacggtaaactcgaggttgccgctcggctcgtcggcgtcgatcgtgtcggtccgccactcgagcgcggccgcagactcgttgtgcgtccactcgccggtgttcgaggtgacgttcagatgcaggccatgcctgggtgataatgcaggggccatcctcagcgacgcgcttggggagggcggtctggcagagatacgtacgggatcgggatcgagatgcagacgtcgcggagcgtcaggtgcttggcctcgagctcgtactcgatgttgacctcgacgttgccttcgccggcactcggccagcagttgattccgagcgggacctggctctccttagtgccgccgagcttccacttcacgacgccgaggcccttgccgacggggaagtcgcgcttggcgtccttaagcgcgacgacgcgcgggccggtcggcgcaaacttggacacctgcgggtggtgcttgaattggatgtcgctcgcgaacgacgccgagaaagagggcgcgatgagcgcgagcttgagcttggccagcgccgagtccgagacgagcagctcgagctcgcccttgaggtcaaaggaagccaggccaccgtcgcgaaggagctggagtgacaggtgctccgtgatggcgacatggacgctgttcgggggcgacgagcaatggtcaacccggggtcgtctcggaggatcacagacgacctgagcgcaacgtacctctccttctcgacctcgcccaagacgccgacgtccggaccggccggctccgactcctctggctcgggctcggcgtacgtctcgcggacctcgggcgcgccaaactggcccggctgcgggacgtaagcctcctggctgacggccgcctcgtcgccgagcgcgctcagtaggtcagactgcttgggcttcttgccgagcttcatgccgggcccagagaaggccttggtcggagccgccgaggacggccgcgaggacgaggccgagggcgccgccggccgctgctgctgctggtactggggcgcctgcggggcctggtagccgccctcgccctgactgccatacgaggccccgccaggccgcgtgcctccgacccgggccatttcgcgccgctggtgctcgagcatcttcgcccgccgcttgagctcctccttggcctccatctccttgtttcgcgcgataatctcctggaccttttcctcgtgcgactcagccgcgaggatcgtccggatctcgctcgtcgtgtgcgggctcgcgaaaccgagcggcaggagctcatcaaaggtcgcaatcagcgggaacgcgtgcgcgagcagcgtcgcctctgtcggcggtgccgaccggagcaggtccgagatggatcggacgatgagcgacagcgtcgagatgtcctggcagaggcgcgcggcgtcagctttctggaggcttcttgaggtcagaggcagggcgagcgcctgcctacctggaggatgttactgccgaggttggtgatgaggacgacccagacgtcgtccatcggctggtagacgtagcggacgtcggctgtctcgaccgtcgtgtgctgactgccggccgggatgagctttggaaacgatgtcaggagcgactcgatccgcgagcgcggcaagtcgagcagctggcgcgagatgatggctacgaagcgggccagaggaaagaggcgagagggtcagctaggtcgagctgaaagtcggagtgaccggcagccgagggcacgacagcgacgagctgcgagcagctcgatgacaaccttgcctgcgacagaccagcggctgggtcaagcagcacctccgctgggcgactacgatggcagcagctgccttgtgagcgagtaggggtcggaagggggagaggacgtacgcttcccgcctcgggtgacgatgctggcggcgagcacgacctgaatgggcgagatagctgtcagccgggcgaacttttctgcgatgctgcaacccgacgtcttacgcaccatggttgtggacgagaagggctgagggaaaggaaggggagcttgggcagaagagggtgaggtcggaggggtcaacaggacgagggcagggcggcgccggcccatctcgccttctcgcgcgcgcgactcggcggcgcgtttcgtccaattcctcccaattgcgctcgattcatgagattttatgatcaaatcggtctggcccgtctcaatccgttcttgatgcaggccaccgctcgcctcagtggagccaggtgctcgccttcgcagcagccgaccaaccgccgcgacgttaacctcgcccgacaccatcacctctgtccagcctctccgcttcttcgtcttcagtcgcacctcacagcaatgtcgtccctctttggctcttccagcaccgcgccctcggcagcaggtccgtcgctctgggatctcatggcctgcaggagcgaagcacacgtcaagctgaccactcgaaccccgtccaccgccttcgccgctccctctccggcctcgccttccttcgctcctctggtcgctggcacgtcccttgatacagagcagcagcagcgcaaggagcagatcaagcagcaggtccagcaggagcttcagcttgtcaacgcccaggagctcatcaacgtccgtccactcccgaagagctgcactggctcggcctgtcgagctggacccctccggcgtcactggcttggcatgctgacaattcgtttgttcctttccgcacggcgcattcgccttctacagaagatgaacgagaaggtgtgtcgcttccgctctctctgcagtcacagcaaatcgacgctgacgacttcgcgctgcgttgcgcactcctcctcgcttgtagtgctacgccaagtgcgtgccgaaaccgggagcgatgctcaccaaaagcgaggaggtgcgtcctgtctccgcttcgggaacccagggaccagcgaagagactggcgctcggtcagggagccgatctgcttgtggcgggccgtcctacgcaccgcaatctccgcagtgcgcccgtcagccgtgctaccccgcacaggacgtcgtcgcccatcgcaggtgtctggtggcgaaggaccgcacggaggtccgtgaagctgacttctgcgctccctctcctcgcgacagagctgcgtgacgatgtgcatggagcgctacatggaggcctgtacgtccggaccagaccgaactcgcagttagcccatgccacattactgatcgccgccgccactcggtcttgcgccttcagtcaacactgtctcgcgcgcctacgttgcccggctttcgaaggagcgcggccagctgtcggccgccggcggcggcatcatggcgcccgggtcgctgtgagcgtctttcgggcaaacgaaaaggaaaaggatagggcgctagggaagaagtctagatgcgatgactacctcgaacgagaggctacctggcccgtatgatccggaagcaaccgaggtcacccggctcccgactctgtgggtcgggctcctgcgcgcagagccggcgctcgctgctgcctgccttctgccagaccagcagcgggccgcgctgatgcactcgcggaagcaagtgagcgccgtgaaggctgatgaggtctcgaagctggctgaagattgtcttgggtttggccagcatgtctcgacgggcgtccaggcctccttttggccggctcgcccgagagtcgacgcgcgcgccgccgtgtgtcggaggcgtgccagcatctcagcccgtgttgctcgcctccctctgaacccccacccccttccacataccctacttggccagttttctcctatgctttcccgctggaccaagaaggacgcccagatcagcagcagcagcaacggcaacggcagcagcgggcccggcgccagcagcagcagcgaccggccggatgcgggctcgacggcgaccggcagcggccagctctcgccgaccgctccagccaacggcagcagcggaggaagccacaacctgtctcttatacacatctccgagcccacgagaccgatcagtatctcgtatgccgtcttctgcttgaaaaaaacagttaacatatcgatttctgtgcctgttttaagaatgtcatgagcctttgccgacttcatgggggggggggcaagccaaggtcgtgcggagatgcgagtggcttccagcaggtgggatgcgatgagaggagacaaagacggcgccgtgagccgccccctcagctgatgttctcgcgaccgccgccggggctctcgacgatgatgccaaagaggctttcgggcggcgcgagcgacgaagtgtcgacagcgacggacggcttgtcgggcttgattgtcataacgctctcctgcgactcgagcccggccggttcgtcgacctcgtccggcggggtcgagaacgtcggcggagcggccgtatcggacgactgccggctcagaggcgacggcttggtcggccgccggtcgggcgcgtcccggacggaggacgagtgcaggcgggtagcaatgtcgtcggtctccccgctgtcgatcgactctggctcgtccgagacctcgaggccaatcgacgcataggccgtcggcgcctcgccgccaatgtcctcgggctcgtccgtcaagaaggaacccggtctcgagcggtagccgctgccgtcggcgccgtccggacggctcttgtcctcctcgtcttcgtccatttcctctggttcgtcgaaatagtcggggacctggaggttcgacgcgccggtcgactggcggcccgtcggcggccggacgtcgatgctcgacgaggggagcggcccggtcgacacctgcggggaagacatggtcgacaggggggcgagggacgagtcggacgtgaacgagagcgcggttgaggacgggctcggcgtcggccgccgattcttctgcgtgagcttgcggaacttctggacggcgcggatgacggcactaaggggaaggggaagagcgaaggacagctctctcagccagcgagtcaagaaaggcgtttcctacaagagggagaacttacaaggcggacgagatgcttcggatggcgccccgcagctcctcaggcgaaggctcgccgaccatgcgctcgtcggcgaggttgaccgccttgctcggcatgttgatgccctcgaggtagggatggctctgcaacgcaaaggagtcagcaaccggagataggcaagcggaggactgtcgaagccggacgcacccggatctcgtcgatcgtgatgcgtgtgtccgcatccttgtcgagcatccggcggataatgtccttctgcgcctcgggccactctgccgggatcggcaccgggtcgtcccggatcgagtcaaagaggtcgatcgggttgtcggcaatgaagggcaggtcgcccgtgagcatgacgtagagggtgacgccgagtgaccagactgttgcgtaagaaggcgaggttacgatcaggacgagacgatgggacgcggctgcgggcctgagtccggacggcacgcactgtcgatagcgttcgggaggaggacctcgccggctacaagaagaggcagagcgcaaggtcagcctctctcacgacgagtcagggcgcgtcgccgactgacagattgtgcactctggcggcataaaagccgggctgccgttggctttgttgatatgggcgtcgccgctcttgttgaacatgtcgctgacgccgaagtcgcaaaacttggccgtctcgccgtccatgctgagcaggatgttttccggcttgatgtcgcggtggatgacgccgttcgagtgaaggtactcgagcccgagtataagctgcgagaagtagcgctttgactgtgccggctcgagcggcggcttggagcggcacggcatgtcgaggagcgtcccacccgggcaaaactcgagcaccatgaagaggccgtctgagagcgggacgtcgagcacctcgtacaggtggatcagctggcgggcgagaagggggtcagcctacaccggttgaggccgcgctcagtcagcccagggccaacacgtacgttgggatgatcgagtttcttcatgatggcgacctcgcgcgaaatgaacgtcagcggattgtcctcgcccatccagcgcgggatcgtcggcggcacaagcccaccgccgccccggccaccgcgcgcagccgcacttcgtcgttcgcgaacggagcgctccatgatctgcttcctgagtcgcgactttgagtactccttaacggcctgcatgtgagctcgaatcatcagttttgaggccaagcattggcgagtgaggcgccgagccacgcacgaaggtcaggccggtctggacgtcgacgccgagctcaaccgttccgtaggcgccctggccaagcacaggtccgagccggtctgtcgtcgcgaagaactgagcttgtcagcgagcgagcacgagatcgacgcgtgctcgaggaagagaccgacactggttgaccgttcgccgcccgtcctcgccctcggaggcaatggcgtccatcgtctctttgacgctgagcaggtagcagagtcgatcccggatcagcacggctagtcgcgtcccaaagcacgttaaaggagacgtaccgatgctgggacgacggtcgccgcttgtgcctcgtcttgcggacgcgcttgtcgcgcacctgctcgccctcagcgccctcgccgccaccttttcgcttctccttgctgctgctccccgccgctgctggctcatccgtcttggggccgttggcgttgtcactgttgacgtcttcgaccctcgccggcggatagtcggtctcggccggaagctccgctgctgacgccggctggggcgaggtgcagtacggcagctctggcgtcgctggcctctctccctcttccgactgcggcggcggcggcgaggcaggcggcgtcgttggagcagtcgaaggcgtcgtcgtcgtcgtctgcgctagggcatcgacgtcgggcgtcgttgcggtcgaaggcgagcggccgagcgggtcagtcgtcgaagaggacgtcgtcgagtcgaggctcatgctggcggcggcggcggccgcagctactgccaggttggccgcgggggcgtgcgtgtgggttgactcggtgacggcaagaggtggcaagcgtgacagcaggccgggctagtaaggtcaaagtgcttgcctgcgtgctgtcgaggggaagcgacggatgtcgttagggcaagggaactggccggagagaaggcggcgggggcggcagcgtcccggccggcggcgtctgcaatcgacgagacgaggacgagcctggcgccgctcgccgttattggccacgtcgtcatccagcgtcgtcgaggcaaagcgaacaagacttacagggcggcgagctcgtcgaactctctctagacgtcgacagcagcagcgagggagggagcgaaggacaactgtgctcaccacgcccgcccgcctgtcgcccgagcgatgacgacgggccgctcacccagcttctcccaatgacctcccagaaatagcgcttgccctgctcttttagatgccctcacgagccatgactttcgcgacgacggcggcggcagcagctgccagtgcgcaaggagactttcgggcgtcgacgacgtattcgtcggcttgaagctgacgcgtttatactttgacacgcgctccctcaccgtcaagagcaggttgaggaagctgtcgcagtgggtcgaagagggttgctgacggccgactcaccgcccagggtgacacaagcagaagcgggacgacttgacacagcggtcgacgcccctcaccctcagcacacggcctcgcaggcgcctctcgcactgctctcggccggccggccgtctgtctcgccaacctctaggctgatttccgacgtcgacgttaacactacgacgacgatcctcgcaacttcccacccccgaataagggcacgaagctttcggctcgtcgtcgcgctcgcataggcttctttcgatgtcgaccaaccaacccctcggctccttcgctagcgtcgcctgccgctcatggatctgcatgccggcctgcttgccctaacaacgtccgcgagcgacagggaggggtgggcgagggtgaggggaggcgggtcggggcggagcgaagagcgctcggccgttcggtcgttgatctgtcgagcgccaacgtcgaaggaggcaggaagaggcagacattggccttcggccgggatggctctgagaagggcgagtcgacctgatccttcccgacatagctcgatgtctgcagactgacgggcgagggaggtcgtcacgcatgcggctatcaatcgtctgccgatagggactaagtcggccaacccggggaccggcccacgggaagcaaagagagagggatactcagcaaagccgtcgagcggtggcggaagcccgaggccaaaaggccgagcagccctcgaaggctgaggcacaaatcttggagagcttctgtggtggatcgcaggaagggaaagggaggcgcgaaggagcggactggagcgggagcagatgggggcggtcggccgcgggttagagctgcttggtccccggcacttgcacggggagtcgggagtgacggtgggcctccagctgatcatgtgcggctgctgtggcctgcctggcgcttcccacgactcgggagagaggtccgaatgcttgcagcttgcaaggcgcccgcccgcccatggctgccggcggcaggtcagttgcacagcaggtcagccatcgcctgttgggccctttcgcgcgcggtccgagaggcgcctcaaaagcgttccgcggcgagcggcagatgcggcagccctgcggcagagctttcagcagagtgcagatcgcagggacgagaagagtctttggaaggatgacgggaggcggcaggcactcagcggtttcaggagcgcaacaaacgtcggagtgcactgtcgctcgagccgtcggagtgggcgatccgctgcggcgtgcccaccttcctcgctcagcgcccagcgatttcgggctgacctgcccgacgactgggcaagcgtcgttgggcgttgaccgcgggcgtcaatgcgtgcatgcgtgcgtcgcaggcgccagccaagaattgccagagtcgtttcggcccgtcgatcccgaaacggcgtggcccaaccgcgttcggctgcgggcaggggtcagctcggcacgatgaacactctcggcagaccagaccgaaagtgcggatgcaggccagttgaaagggggttggaggtcggtgggccaaagcggcgcccgctgctgggagggtttgggtgcgccgagaccgccgggccgagcgtggaaacgcggcttgggcccctgcctctgctgctgctggcctgtctctgcgcgcgagcttgaactctgaagtgcatcccctcgcccgaccaagacaggcacacacgagcgggcgtgagaaggagaaggagagtatcgtcgtcgtcccatcctaccgacactctttcctgcctgcccgtcatctccctctctctctctctctctttcctgcctcccttcttccctgcccgtcagccgccaccggtgagtttggcccacggcctcgacctcatgagcgaggcgaccaagcgttgcgccacctttccgacccgagggacgacgacgccgcccttcttgccccagagccctggctgacccgtctcccgccttctcccccatcgtcccggccgacgttgactctcgctctccccttcaaggccgtcgctcctcctctgtccgggctcgtctcctcgtctcctcctcctttcgtatcggcctcgtcaatccgcactcgctcggccgtcccgcccctccctctctcgccttacatcggctcccgcgccccagctgctcccgttcgagccgacgacaccctgccgaggccctcttccacccgccacgcccttactcgctccccctcgcaagtcaggcggatagcaccttcgctccttcgacctccctttcccccaaccagaggcgttcccgccctctatcttccctgtcggcctccctgtagtatcgtccgtcacctttcaccgtctcgtcggctggtccaacggggccccttcttcgctcttcctcgtcgtcgtcgtcgtccgcagcggcaccgcttccctcctcgtttcggatcttcgcctgccccgccccgccagccatgccctcccgcggcttcaccagcaactgccagaacctcgtcggccaccgggtgacagacggctcctatgcgctcgtctttgaggccgtcctcggcgtcggcgcctacggcgtcgtctacaaggcgcgaaacctcgcctgccacgggcccgagttcttcggtacgtcgaccgtcagccaccggttgcctctctcgcacccctttccagcgcgaccgcctctcgtgttgcggctgaccgtctgtccctcgcttgccctgccttagccgtcaagtgcctgaacaatgcctcgctcgacgcccgccagcggcactttcagcgccgcgagctcagcctgcaccggctcgcggcctcgcatccgtccattgtctctattcatcggatcatcgagtcgccctcgatcatctatgtcgtgcgtttcgctccttttccggccttggcgacgacccgctgacgagcctctcacccctgcttgcttcaggttctcgactactgcccgaatggcgatctcttttcgatgatcaccggcagccggcagccctacattggccatgaccggctcatcacctcggttttcctccagctgattgacgctgtcgagcactgccacgcactcggcatcttccaccgcgatctcaagccggaaaacgtcctctgcgcacggggcggcggccagctcctgctcgccgactttggcctcgcgacctctgagcggtcgtcaaaggactttggctgcggctcgactttttacatgtcgccagagtgccagggcgggctctacgagaaggttgcggcgtacgacacggccgcgaacgacacgtggtcgctcggcgtcatcctcgtcaacctcacgtgcggccgcaacccttggcggcaggcctcggtcgccgacgagacgttccgggcgtttgtcgccgacggcaactttctgcggacgatcctgcccatctcgcgcgcttgcaacgagatcctccaggcgatcttccagctcgacccggccgagcgcgtctcactccgagagctccggcagaaggtcaaggccgtccggcggtggaacatggtgcgtcttgcatttccagcggcgtcgaggtgccggcgtcgagtgctgatccgcgattcgtttcttcgtgcgccccaacagagcgaggacgagctcgtcagcgctcacgagcaggctcgcgtcgctgccgaggccagcgggcacacgacctcgcgccggcttcaagcccgcgcggccgtgctcgagcagcgccggcgtgaggagctcgccggcctcgctgccgctacatcgccctctcctcctgccgcgtcgtcgtcgtcggctgagcacgccggcccttctgggagcttgtcggcagcgacatcgtcgatcggcgtcctcgtcagcggccggacgtccttctccgcatacagcgacgagagcgacggctcatacgcgaccgaggacgacgacgacgacgtcgcccggcgccatccggcctcgctgcccgtttcgcccgcgcactctgaccagttcgacgccgacctcgtgccagaggaggaggtcgacaatgtcgacgccgagccacctgcgctcctcccgccgcaagggacaaactactcgcgcccgacgctccggacccggccgtccgtctcgtccatctcgtcggcatcctcggccgagtcggccttcccgacgacgcccggcgcaaaacacttcaaaggccatccgcttccgggcctcgaaggctgctacgatgcggacgccgacgcggacgccgacgagggccgcggcgtcggcgcccctggtcaggtgtcggctccatgtgttgcgccagtcgaggcgaaggctaggccggcgctcggctcgctctacagcgcacagcatgcgctcgctcagctgcacgagctcgagcttcggccgtcgcacggcgcgcagctcctgctccaccaggtctgaaccgcccacgaacattcatctctcgtccctctctctctctctgcttctacacaactcgtacagatctctctctctctctctctctcatacgctgtccacattgtctgtcttctgcgaatctcccttctgttggtaccaaaattccccccttccactcgggcacgccctcccgaccacatcctgtcaagctcctccacgtcgccctcagtcttatactgttcccccgtccgtcgtcctgcgcctcacgagcacgtgcgtgctcccttattgccgccctgctcgctgtcggcctgtccttctttaatgcagtccttgcgctcacacccaggctccgaccccagtcgtcaggtgcggtcctggtgcctgctcacttcgatgcggccctcgtatatgcacggacccgtctgagtttccacccgtttgtcaggtgtatgccgctgtcggtcgaggaagcgggcggaagcaggatgaggccgaggaggcgcccgtcgaccgcctccttcgagatactcgaacgtcgccgctcactctgtcagagctctgcaccggctgctccgcaaaggcctgcaacgtcagtctacgaggtgcaaccatgaggggcggtggagtgtgggccgacgacgcgtcgcgcgggcgcacgggttaggcaagatcagtctgtcggtcagcgttgctctttgctccgctaggccagtcaaaattggacgaacgctgagcttctgccctgcttgggtcgtcagcccgttctttgttggcggtcgtcagggtcgatgtttgtgggcgtgggtcaaggcgggcgtgcctgctctttcgcttgctcgcgcctgcgtttccctcaaccttcatcatcgctccttcctctcgcacggccgcacctcctcttccttacgcctccttcgcctcctctgtcgcagatcttctgctcctagcggcaacaacaacatcggcgcgaccctcctcctttcctgatgagcgtgagccctcctgcaatcagccgctgtctcgcgacctctgcgcccgtcggcctgcgaactgacgtccaagagctatcggttgaacgacccgaccagtcatcccagccccatcgccagccgacaaatgtctcgcggtcgtcgtacgacgactactcgtcctcgggccagggcgcggccgctggcgggagcggtggccggcgacctgacgtcggcaagaagctcgtcgtcgtcggcgacggaggctgcggcaagacgtgcttgctcaccgtgtccgttctttccctccttccgggtaggccaggcactgctagttctcgttgaagcagacactgacagctatctctctacgtctgctctgcagctacgcccacgatcgctttccggtggtgggttctctgggtcgacggctctcgcgggctcttgcacgcgcggctgctgacgctctcactctcgctctgctgcccgtcgccctctagaactacgtgccgaccgtcttcgaggtgggtctctgcttctctggagctctgagacggccccgctgaatgtcgcgctctgtttcgcaactcagaactttgtcgcccatgtacagtacgagggtaagctcgtcgagctcgcgctctgggacacggccggccaggaggacttcgaccggctccggccgctgtcgtacaacgacaccgacgtcgtcctcatcgtgtttgcgatcaaccaccggccgagtcttgagaacgtccgcgacaaggtgcgtcgcccgctcgctcgtcagggcgcacagcccgcagaccccaagcagctaacggaacctcctctcgcacgtagtggcatccggagatctcgcactttctcgagacgacgccaatcctcctcgtcggcgcaaagacggacctccggaccgactcgcagacgctcgctctcatgtcggcccagggcacgcagcccatctcgcgggccgaaggcgaggcggccgcgcggtcgatcggcgcgcgctactttgagtgctcgagtaagctcggggccggcgtccgcgaggtctttgagggcgcgctcaaggagagcttcaggaagagtcggttcgggctcggccggagcgggggtggaggcagcggtgccggcggagggaacggcgggtcaggcaagcggcggggttgcatcgtcctctagagtgacggtgccgcccccgacaccttggccgctcctctcgcatcacctccccggacatttctcttcgtctctcttgcacgcttgtatcgtccccgcctcttcctctctcgcgctttcccgacccccggccgctcgaccctccgcaccgggggggggagcgctgggcgatcacgacctcagagtctgcagcgaaggaagggaccatcaatgagcggcgtcagtcgacgctatcaaggaagcttgggcccagagcaaagagtcgcacaatcgacgagcaactcgacctcgtcgtccgagtcggtcagggatacaattgactcgtttgcgcgctcgcaggatacgcgcgaccgagtcttcaaggtcggacacgaggaaagctcgctcgtacgacggttggccttgtcggcgagaggagcctcatgctggcggagggcgagtcgatggaggggggaggcgagctctcaatgttgtactcctcctgacgtcgacccaacaaacctctcagagcttcggaatcagcgcgctacttttttgagcctccctcgccttaatcgtcacccccaagagcaacttctggtgcgagcgctgtcttcaggccatcctctaggtagcgcgcagattgcgccgacatcattgaagatggctttgacgaaggaggcgggggtagcgcgaaggcatgcgaattgatgaacagggctttcggtcaggaacgagacttcgaacgggctcgaggccacgcggtgataaagctgcactccaatgatttgattgagaatttcatccgccgcttctcgtctctcaaaaatcttgccggtctgcagctccaccgaggagaacggctcctgctccagccggcgaaggagggcgattcgtcttggctgtcccggaccttacgcttcatcgagctcgacgtaaccaagcgcaaagcggtcaaccttttcctcaactgaaaaaacggaggccgcaagcgcgtcgacacagatctggagcgccgccggcaaaagtgagtctctttcgatcgggcgagatagtgctcttcgactgatcggttcgatccgcctcctctgaacagcctccagaccgtaaacaagctcaagatccagcgtaatgcagccgatctggagacgcctgtccgtatccgcggcagcgtcatcttcagtccatggacatgcacttcaataatttgaaaatgattgagtgtcattgccttcaaatccactcaattcacccatctcgagagaaatgatttgaatgcattcacaatcattggcttgtgggacgggtcgaatcaaatcaattcaaaaaagatgagtgaaagagttactcggccataattgcttcaatcactgaccgggtggtttatggatcacctgggagtgaactgcggcgagggcttcgacatggagtgcgaggagggcttaagtcgaatcgaggaaagacgtaaagagagaggcgaggagaggcgaagagcgcgacgggacgtgacggtcggcggcaatctgtggactcgtcatccccgtcgtctgccttcgccttgcacttagacgaacgcgactttgatccttacctcctctccggcactcagccagctcagcctcatctcccactcctatctggtccatgtgaggcccaggctgacgacccactattgtcccctgtctccgccgtagtccactcgatcggatgctttgagatggactcaactttaggaccggcgcttggatcagctgggccgggcgcgcgtgcccgatcacaatggttctatatgggttggaacagaccgcttgagttcgcctggctcaggcgcacggctcagccagctcgtttgacgtccagtttgagcctccccttccgccccaccgtccttccatcatcatctggcctgccgctcagcatctctcgagcgccccctcaaccaccccctttgacagccgactcgtccccagccttgtagaaagactggtcgccgcggctgccgccgcccgcgcagcctccagcgactcttgtcgtagttgcagtgaccgataggaaagttgacattgcgcagtcatcgagacgcactgcaaaattcagaaccgcatcgtgaccgagtcgggcgctccgcgactgacgattcgtggcacggtgaagaagctgacggccaaccgcaggactgctgcatttaccgcgtcatcaaagcggctctccaagcgtccgagtatctggcgatttcccctcacgagtgcaaggcctacaatcgccacatccgtgcccaaagtcgtcccggcacgcggtcaggacggcaccaagctcggccgcatctttggccgctgaacaggcaagctgctctggaagggttctgacgatgttgcttagactactctccgctcgaacgatggggatcgctttgcaaccaagcatttcttcgaccgtgcgttccaaaacctggtctgctggcgggcctttcttctctggcatgcgcctcggattggacaggcgtctcgctcgacgccgtttccgggtcgacatcaatgtcgctgcggatcgacatcaacgtcgctgcgggtcgacatcaacgtcgctgccgatggcaagatcagcaaacacgtcggcctcgtctctccctccgtctgatgtagtcggttgtagctgatactcctcgccgcttgaggtgcgcacgccttgaccttccttggtcacgatcaactgcgccttgacgatctctctctctcccatcaacagaccgcccttgaaatcgcgagcgagctcctgcgcgcgactacatctcaattgccatcgcacgtctacaagcagacacacgcgctcttctattacacagcagccgagccggtacataccagcgtctcacccgaaacatgtactagtaccattccaatggtacgtcaaagtatatctaccaataccctcctccgggtgatctcaggatcatataccaggtcgtccgtggtgtagcagctttcttttgctcggacgggctcttgacgctgacctgtcagactgttgcgtcgaaagcccttactgacggctgccgagcgcagtcaggtcgcgtcagcacttccccccccagacagcgtcgtcgcggcgcaacgacatcctttccctcattagcccgcacaagaaccttctgagctaggtgtctgatttcactcttcctatcctgcgataagagttcgaacgcatgacgacaatctagcatgttccaaatgggcaacgctcttcaatccgggaggctggagttaagagtttgtctccccgtgcttcaccctctcgtctcccgcagctgccgatccttccttcatgttcctggcactgctctcggtcgccaaatgcttcgtcctcagtgcgtcagacgacgagggcctgcgtgttctccatcacacttacctttccagcatcgccctccgtccgcggccatatcgattacggcgccgataactactcgccctttgaccaggtcgccttcccgaccccagtcgagctcatccagtaggcgcacgccgacgcagtccagcagcagctcgctgccgccgcccaggccgagctcgttgcctcgggtcaggacctcgcagcaacttgggcgtcgcacaactcagcccgacttcagctcgctggggcctaaacggagctgtaggccgcccggcaggcgctccgacaagcgtagggcgacctgcgcgcatagaatgttcaacacatgggccggccacagcttgcagcctccagctagtcggtggcactgcccctcgctctcttgcggacgcaaccgggcccctttcggaccagtcgctgccgccgcgtccgattgcacctcgcaaagatcgggtggtcgaccctgcaaaggccctctacgtcgtttccgtcgggttaggcgttggacaccagcctctcgttttcggcctagtttgcctctcctttgacatcctcttcacctctgtagctacttgctctcgtcgggcgcctgccttaccatcgacgtctctttcagatctttcttctcttcctactcctcccgtagctgccgcatcagcagcaaaagagtgcatcgttcgctttccagggcagaatcctcttccaggccaggaagggggccaccgtcaagcactgaccgtccattgcttttgtcgtcaatctggccacggcttactttggcatcgtcgtccgtctttccccagctgcggcgcccgcgtcatgcccgttgcttgtcgactgctttgcttcttggtcgaggcgttcgaggtagctgactgatcaggggagatctctcccggagactaccagacggttactatcgctaaaacatctgttccttccgggcgcttgttacaggtcaacatttctgttcctaggctctcgtaccaaaaaaattagccgctcgacgacatcctgagccccagcattatcagggctgctgcttagtacgagctcactgtccagcagtcacgagtgtcgcgacagcatatccgacaccggctgctgatcctcttgcttccgtagctgtttcgcaccactcatgacaacgcccttccttgctcttgatgtaagtgaacatcatcaagggttcggtaacaacatcgaatgctgccccaatcctagaatgactggaggaattttatagctacgcttttggacagagattgtctattgcaagagccgacacgtttcgaaacctttgtatagcagctcggtggtaacaaataagtaacgaattctccgtgaacgaatgcaccattgcaagcagacctttgttgccatgcaactttgcgtcttggtgtaggtattagcagctctttcagacgttaaacattgatttttcggcccagaggaaggagtgatagtagattcgtttgacaatctgagaagcactcctccgacaatttgagaagcttaggagatgtaagacgacgtgcagaaaagcacagcaagttatcagcctgaataaaagaatttgagaagaagtagagatgtcacgagcgaagctttcctgggaccacctctctgaacccgagtaagtaggtactttcctgtttcacatcagtacaagtgatcaaacataacgctcatgttcagacttgtgcgggactctgaggacagtgttatgtttcaaggtcagaaacagatgttggccactggtcattgacatcgattttttggttcttgtaacgcagcgttgaccaatttcgtaggaaccgtggtcgtgaccttgagttggcggaatgaattgttgactgcgtataggcggaaattcgttctcataattttgcgctcgttgccgagcaagcacagcctgatatcagaacagtggactctaggtgtaggtaggcgtgattgatggtggaaactactcaagttgtagacggcactacccctggtcttgacacgcggcctcaggcgctgaagaggctttgcagcgcggctcgctgacgttagtcaacatcatgcatgcagcagaatattcgttatacttggtgagcgggcaggccaaagaatcgcccagtagacgcccgctcaaacgagcgctgacagaccttaattctgagatgatgcctccccggaagcaatccgtattcaagatgtctcgattaaacgtaatcgaaagagccgcctgcgggcgactggaacctttctgcacagcggcggcgcagatgtgagccttgttaatgattttctatacaaaacgctgggtgctcagacaacgtggcgatagagagagagaaagaccaaaataggggccagcagctgcagcaagattcggacattcgatgctgaactgacgagccgtttggttttgtgttcgaaaactagcaagctcggtttctggcggcttgaaaagtcgttggaaagaacataaagaaagccgggcaaggagtggtaaaattgatgaggagggcccctaggatagcaaagtgcaatgttcatcaaagtcgttttgtttgtcgctgttctatcattagctgaggtgaatatgtttggctgatctcgctgtcacagcggaaagggccttgggcaaaatgtcaaagcgcttactactgtatctacctccggcagcccgcgaagcagccgcagtgcagttgccatgtgtaggtgtactcccgcctgtcgagtagcacggctggccgtttgaggtattgattgctcgctttaagacttgcctatagcagcagtgtcattatggttggcgggtttttcacaattggcaagtctacttctcagttttcttcctagacggggcgggctgacattgcatatccacgatgctcccgccctctgtttttattacgcctggccgctttatcacggcaaatctactttgctcccggtttcccttgcggacgaagagatagagagaacgtggactcgaaaagtagtcggcggccgggctagtcggcgctgggttgctgtgaaggggcccttgcgaggacgtttgctgctatacggagctatagagatgcctgcgaacgcctgcatcttggcgactgggcgatttgactggtccagggcgcggccttcgtcaaacgactgaaattggccaggacgctcaacaaaaccgcaagcgccgacgttgcgcggtaaggtagccacaaggctgggctgggcggcatcttgtcgctgttcctttgctatcgtttcgaggagccaaatcgatgggaaaaaacgctactcgatacagcgcggtgcccggacgagcacccgcccgtcgtggttgtcgatggtcatgcgtactacgcccttagcttcatcatgctggggctcatcctggagatcggccgctgagggcgcgaaatgcaagtaaggcaagcaggcgtcagcgccgagtcttgcgcagacacggcgactcgttactgactgacggctcgtacagcaaggctcaagtcaaaccgcacttactagccctcaatagaacgcgtcgcccgccaagccttatcgtcaggatgccgcaggaggaagtcatcaaagtggaagtgaatttaagtgtggattagctgattggcttgctgcggacagtgcaagagactgactgagggtgcgcctgctcgtactgcgtcacgccagcgttggaccgaaggatcgcctgctgggcggaggggcctgaaaccaagtggcgagaccgtgccagccagccaactgtcctgaccctcgtcgtccgagtcggccgcagcagctggcgccgattatcgtgagggagcagccgcaaggattgactgacgccgccggccagccggcgactcgacctggcctcgttgcttggccctgcctgctgcgacacctgcggcgtcgtgtgcggcatgccgctccccggttgtatggccgatcggacagccccgctttcggctggatgctctgcacaatagagctcaatcaaaccgtgccaccagtccttggtctgcgtgtagaggcccatgacgcccatcctgatgagcacgtcctagttccgcagttgcgtctcaatgtcgtcgaggtggggatcctcgtcggcgatggcaaagcacagccagcggctcgacgagctcgttgttttcatcgcggactctgagattggcgccattctcatcaagagcctttgactggccgttggctatagccgtcgccgatcgggaactgaatgacgtacatgctgcgttcgtcctgttacatcttgccacgcagctcctggttttgcagcactgcaaatttgagcaggtcagcatttacaccctgcggaaagagtttatcgaacgcactcacttcgcagatcatcctggattgagtcaaactctcaacaggcgccatcaatttcgacgtaacagagatggtgtttgcggctggatattgaagctatctatctttctgtgagaggcaagagaaagagctagtcagtgagatgtaactgaggcgaacgggatcaggagagactgacttcggacagtctccgttctggaggtcctcggcccggtccatccgcccagattctcacgccgatcttgccgttggcgatgttgtcggccactgtcttgatcgcttctcagttgaagacgcgccaaccgacgcgttgttgacatcgaacttgcctcaaaagatgctgccggccggctgacggctaatatggtggatgccggcgggctggccaggttgcgtgtggggctgaacaactcgtctgaacgtggcggtgccgcatgagttagtgaccgtctgtggcggctggtagctcggctgccggcggtgcttggcccggggctgcgtgcggcgcgccaacggcagttgatgcctcaaagttggatggaccagagacggcgtaggtccgaccgacaagactcatcacgggtggctaggtcgccgtgttcgcgttggcgacgagtagtaggcgcttgcgccccacctgccccgcaccgtttcttgagcggcgctccgccgacattggtgatcgatcgagtcgaccaatcaagcgccaggcctatgagcgcggcaggaaggaagaatagtgtgcggtgtaaggaatgattggcgcctgacgtgctgacgtggtagtcgggccggcggacgagatctactgcgggcgtcgtcgcgctcgcgccacttccaactgagacacggccggccggcgcctcatcgagctcagcctccacaggaaggacgaccaaaaagttgtcggcctgcgacgcggcggcgtgcgagacgagagctgccgagccggacaaaggacgaagaggcaacagacgacgctgaaaggttgaccgactcagacccgagcttcgttttgatatctccgacattggcgacctcctgggccaagtcgatttcaggacgattcagctctgtacaagttccctcgccgtggtgaggacggtcgtagtcgtgggacggcaatcgaacggagcaccgggctggcggataagagggatccagaggcggtcgcccttgggcttggcctgctctctctcgatcgctgatacgacctgtttggcagatgataggactaatctgcaagcggcgagattgtatttgcgagcggaaggggtaatccgtgcggcggatctgggcatagctaatcgagaccttgtgttgctcgcgggttcagacaggtgctcggaacaaattgagttgctgaacttgtcctggtctggtatctgtcactgtgaagggatgacggctctacacaaacacgcggaagcagcgcaatctccggccgagccagtgaaaagcgtcggacgaggagacatcgaccatgatatggcagccggacactgtatcaagtccttgcccagcaataggagcggaagacaaaattgtgtttatagattttgcttttcaatcattccacatcaaggcatgaatggtgtagtggtatcacgcaatgttagggctaagtctcgcttcattgaggtcctcggttcaatcccgggttcgtgccagttttgtcccggatacgccctccgtcgcgcctgcttgttgtcaagacctgcccggcgacagcacgccaacacattgatctgatcgcctcgggcctatctgtatttgatttgctcgggacgagcacgacgcgtgcccggttgttcacagcgcctgcccagtcgttcacagcgccgcccacggggcactggcggccctcctttgggctgggcgctgtgcccgccgtcggaggcccaaagtttgcggttggcaacattttgcctacttggcgtcatcccaccagtcggtgtggttgagcccgctgccttcagggtcagcagcagtagctggcggacgaatatcaatgatgttgaaggtgttctgcgccggcaccggctgggcgcagcgcctggcgaccgctcagcggtcacccgggcgccgcgcctcagagtccgccggtctctatctttcctcctctctcttatcgcttcctcctcttagctagacgaccgctcgctccccctcctatatctcagtcgttcacggagtagtcctgagactgaggtacgttcgccccccctagtctagcacccctttagcctaggcagtagctcacccccactgtagtcggccctgcctcctgtctcgtcctacaggtgggatccatgagtcgttcacggagtagtcctgagactgagtcggccctgcctcctgtctcgtcctacaggttatgcgctcatccatcgcatcatccgactcagacgactctcgacaagaaatcctgtcgaccacccccgaactgctgccgtttgccccgtcgcccgaaccgccatccgcgtcgcccgcttcagaagcctctgccgacgaccccagagcccctgcccgaaccaactctaaacagaagctcgcgatgcccgtcggcgatgaaccgacctatggcacctccgccccaacctcgaccacctttaagattcccgtcttcaacggacgggacgacgtcttccagcaatggaagctccgcatcctcagcaccctcccctatgcctgactctcatgctccctccgaacgcccacctttctgccctgcttcaagtccctccatctccacctccaagcaagcaatccaccatgggtgcggccttctcgtcctcatcatctcgatgggtcgctggatgcgcgccagagtccaaggctgacatatctcgctcgacctccttcaacgctgcccaccccgcctcctcccacagcccgtaccaagcagactgctcgcaagtcgaccggaggcaaggctccccgcaagcacctcgccaccaaggccgcccgcaaatctgccccttcacagctgaccggcggcgtcaagaaggtccgtcgccctttgcccgccgagcccgcagccagcgccaccgaccgacgccgagcggcagtcagccagacaggccgcccgaagctgactaccgctccaatcacctcttccttttgcagccccaccgctaccgccccggcaccgtcgccctccgtgagattcggcggtaccagaagtcgaccgagctcctcattcgcaagctgcccttccagcggctcgtccgtgagatcgcccaggacttcaagacggacctccgctttcagtcgtcgtgcgtgtcctgtcttcgtcgtcgccgtcgtcatctgctcgccctcctcagacactgacgctcactctcatcttgctggcctgcccccagtgcgattggcgccttacaggaggcctccgaggcctacctagttcagctcttcgaagacaccaacctcgccgcgatccacgccaagcgggtgacgatccagccgaaggacatgcagctcgcccggcggctccgaggcgagaagtactaagtcggcatctcaactgtcggctaggcctctctcggtcgcgtttctgcaattacttgcaccccccgattggtcggcgagctcctctgtggacaactcaccacgtcatcgctctcggacctggcagcatctttcgtctcgcaaaactaccctctttgcttgcttttcgtcttcgctctccacctttcgcttcgccgctgcccccgccgcctcatctccttgtcctattgggtcgagcaccagccctcccgggcgcttgtagacgtgtatgctagcgccccattgatttaacggtccttttcgtacgagcgactgaacagcaccgagaccatggcagcggggtattataggctcaagcagggccgggccgaatgttcagtgggaggagtgggaggaaagacaggtggaacacaaacgagtggttggaggggagagggggttggctgcgactgcaggtcctggagcaaagtagtgtaaaagctggggaccaggcaacgatgtggaggagaaaggccgagggggagggaagatggattggacgtcgatgcgcagcccttgaaatgaccgcgtctagaggagcgagtccatgcgcgagaagacctcgaggacagtcgcgacgagctcgaagcagaggtcctcttgctgggcgccctcgccgccgcccggcccgctctggtctgcgccgtcggccatctcgcgccggacctcgcgcaccatctcggtgatgatctcgcgctgattggccgttgactggacaccggcccgcttgcggccgcctccgccagcgacgccgccgaccggagcggctgagccgcttgagccgccgctcccgctgccgacggcgacggccccgcccgtgacgcccatgacgccaaagggccacgtgcagaactcggcaaggatctcgtcgcaccggacaaaggccgcctcgcgagcatcgtagtcgagccggacgagggcgttctcgaggacgttggccgcataggccgcgcagcagagggcgaccgcccgcgtcgtccggtagcggatcgacggcggcagccgggcctcgttcgggatggccgacgtcttggtgacgaggaacgagagcgtccgccggacgacgtcctccttggccttggcgtcggcgaccgggtgcgtcgccatgtcaaacaggaggaagttgcgcttctccgtccgcaggacgcccttgtcgacgaggcccttggcgagccgctcgcgcacctgcttgagctggtagccaatcttcatcacgttccacgtctcgcctgggcatagtggttgggcaggaggacgtcagtctcgtcagaaggggaaaggctccaaaagtagcccagggacgaaccgctcatcaggtcgacccaggccgccgtcccgtacttctcgctgctcttcatcattttgagcgcctcgtcgaggagcgtctcgcccgtctgccggtcgtcgatgacctcgattagccggtcgccgagcggcaaacgccggcgcgacgggtccttgacgacggcgatccgtcggcggagagcgagctcgagcaggatgcagccccggagcgcgtatgagatgttgtctgccgaagtcgggtcgaacctcgttgtcagcgctcggaccatgttcgcctgagacggtctggaaggactaaccgttgaaccatgaagtgtagccctagatgatgcggcgggaagagtccgagtaagagcgcgcgtcagcccagatgtcccgaaaggaggtcagtcgccggacgagggccactctcgctcgtggccgtcgagccgcctctcgcttcgatcatccagaccagcctcaggcggcgagcgggctacggcgccgtccatgctctggcgcgcgttggatgcagctcgagcccaactgagcgaccggccctctcagcgtctcgccggctcccgtccctctccgtcgctctccgtcccttcttccaacctaggtcgacgatagcaattgcggaccgtcgagtaccggatgcagctgcagccggccaagccaagggaagggggaccgacctggttgtccttgaggccgagcaggaggatctcctcgagcaacgtgagccggggcacgccctccttctcgtccttgtcctcaaagtcgcgcgggtcgtatgcgaccttgccgcggccctcaaacgtgccgcctcctgcacgttgcgagctgccgttggccgctgccgatgccgaggctgaagctgccgaggtggccttagagccagaggcggccgcggccgaggacgagcccggggcgggcgagatggtccggagctcgtcgtcgtcgttgaacgacgagttgacgccggccggggcgccgcgccggcgcgagaggccagctccagtggacatgtcgcagggtgtgtgtgtatgagagacgggtcgccctggtcgaggtgctgctatgctgccgagtggtcgaggatgtggtcaagggaaggaagcgagctctctcctctccctgtcccgccgccgccgctcttcgccgcgcgcgcgcagaatgtcagctcagaggtcgaccgaccgacttaacctcgacgacgacccgcttcgaccctaacacaaggatgtccgcccagcagcagcagcagcagaaggccgacttggtcgacctggccgccccgcgcttcaacctcgactcgtacctcggccggcttcagcacttccagtcgacgacgtcgccgctgacgctgctcgcgtccaaggcgagtctcgtccaagcccagagcgacgtgcagaaggtcgagcaccaggtcaaggaggccggcggtcggggcgtctgggtgaccagcgccgctcgcgagacctactggaagtcaaggcagcgtgcgtagagtcgtctccgcctcaccatccgcgtcgcggcgcgcagacgactccgtcggctgacgttcgcttcgtccggcctaccatccgcttacctggcagtcgtcgagtcgtcgatccaccccgacacgggcatgcctgtcccgctcgcgtttcggatgagcgcctttgttccgaccaacctcatcatctgcgccggcatgctcacgcccaatccgagcgtacgtccaggctcggcctctcctcacctgcaagtcattgacccgtctgtcttgtcgttaccagatgcgcaccctagttttctggcagtgggcgaaccagagcttgaatgctgccgtcaactctgcaaacgcttcgggcaaggaggccatgtcgacaaaggacctgatgacggcctactcggccgcgaccttctcgtccgtcctgatcgccgtctcgctttcgaaagtcgtcccgaagatcccagagcgctacgtcagcgccgcgggcaaggagctcctcggcaaatttgtgccgttcgttagcgtgcgtaccgacctttcgtccacttgcgacggatgcgcaaagccaaccagggctgatccgacgtctcacacgcactctccgcaggttgcctcggctggaatcgtcaacatcacttgcatgcgctggaaggagatccgggacggcatcgacgtcttccgctacaagccgtcgtcgaccgcacaagccgacgccgcgcccggcccgctcgagaaggaggacctcgggaagtcgtcggtcgccggcggccgggccgtcgcccagtcggccgcctcgcgcgtcttcaccaacattccaacgctcgtcctcccgccgctgctgatgacgttcctcgccgcgaggggcgcattcaagggcccgcgcgcagggctcaaggagagcctgacgcagctctcggcgatcggcacctgcctcttcgtcttcctcccgccgtcgattgccgtcttcccccagcgggcgagcgtcaagctcggccagctcgagcctgagctccaggcgctcggcgacgccgacgagaccgtcttcttcaacaagggtctttgagaaagagggggtcaatcggaaacagaacgtactagacgactctaatgtcatagatggaccggtcaagagcgagagtctcaacctagaggtcctcgtctgactcctcgaggatcgcccacctcgccctcgtgaggtcgcaccggagcggttcggcgtagcaagtgcggttgagaatctaaggtcatgtagatttgcaaggcagacttcatgagaatggcgcctggctgccgagcagcggctcctcctcctcgtgttcgcgcggcgccgtccgacggtcgtagacgtcgtccgagtcgccgaggacgggatcggaggccttggtctggccgacgcgggcagcgaggccgtacgtcactcgggcgccccagatctgtgcaacgagcaggcacgggacggccgtccagaggacgacgtcaaagacgatgtcgatcgcatcggtatctgtgcacggcgtggagtttatcagcggcagccagcagaagacgccagacgagaacggcagtgagggacggacactgtgactgcttgacgccccagacgacaaggagccagacggccgtgccaaccttgaggacgaacgacgagacggcgccccaacgaaggcacctccgcgtaaagtcatggtcccagttgagccggtctgacgtgaaggacgtacaagaatggtgatgtcagcgccagggtatcgagggcgggagggcagagatgcctagtcgtgcttggacggacaggcaagcaggccgaggaagacgctctgctcgagcgtagcctggaagagccaaatgcaggccgaggcgatgagactcgggtgcgacgtgatttcaacacctgtgcgcgagacagagcggttagagacgttccctttaatcggcttgacgtgcagctgcagaagtacggacaaatgacgacaaagcagatcgagaagatcgtgagcaggtggtggatgagaagcggcggccgaattgagtcgcggtagatcagctcaaagaggtaaagggcaacgatgatgacgcctgcgagccggatcatgccgatgccgcggagcgagtagttgccgacgaggcagtcggccgcgattagctggagaaccatggcaaccgtcgtccagaagatcgagagcgggtacgtcgtcgtcgtccgttggactgaggggctcagcttgcggaaggccatgctcttcaaaagaaggaagcgggtgatgagggctgagagccagagggcgacaaagaggacaaggggtgcgaccgggaaccaggcgaccgtcatgggcgagacgctcagcataagaatcttgatgagctccttctggacgtcgtcgggaagcttgtcgacgtccgggtcatcgggcaggttggcgatcggcgcgaggaatgtcgtcgcgtacggcgagttggtgacgacgtcggtgtagttgcgctcgaggcacatgccgccaccgctccggccaacgtgctggcagtgctctgcgggccggtatggtagcatctgtaaggccgcacaagggagtgcgtcagtcgctgatgcatgcgagctgtcagcagagaaaagagtagcgcacctgggtgtgcatgtacctgcaaccggtgttatccatgccgagctcgtagggctcgccaaaggtgcgctcggtcgagagaaactcgaagcactcgtcgtacgaggcgtactcggcatagtcgccgcagtgaagctggtgctggctgcagatgtggcgagcggcgtggagcgtgacgagggcctcagtgtcggtgtcgggcccgagcgtgacattgttctcgagcgcaatgtcgggtaagaggtgcggcagcgcctctttccagaatgtcgcccagcgccgaaaggtaacgtcgtactgtgtcatcttgccggtcgtctcatcgaacgagaaccaggcatcgatggcaagcggcaattcgaagttctgcttgaggtagcgcatcgtgaagacgttgctgagggtgacgatgttgccctggactgccagggcgaaaagctcggacgaaatcgggaccgggatgagcgacgtcgagtcggtcgcccagtcgggcgtgcttgagactgcgaagagtgagcgcgaaagtgtgagctcgctgagcgacgctttgtgcctcccaccgggactcacacaaggcctgcgggacgaaatgctggactggtcagctccatccagacagtatgtctccgggagtaatggccactactcacgaacaagtactcgacattcaaagtcttttttgggaaagttgtcgtgatgtcgacgcgaccgaggatgtcgtcgtcgaaggcggcatagtcgccgctttcgacgatggcgacattgttcgggtagaggaagtcctcggcaaactggctggcgatttccatgtagtcgtaggcctgacggccggcccggacggtgacgagattgatccagctgaggagggcagcagccccgagggtcgcgagggagaggcgcatgttggtggcgagaggtgctgttgggaagggttggaagagcgaccccgtctacagcctcagcggcgacagacctttgagggctggcgacagcccggggctcgaggcgacgtagcggcagcgttagctcggtggcgacgtgggagcgagatgcggagaaggggcgcgcgcaaaccgaccgacggcgtgccgaagcatgctcgaaagcacaccggtgcggcgacgctgccgcatccacggctgtgcgtttgcttggttcggagaaaacggacggggccgggacgaccgagattgcggaggcactctggctcgagccgacgagtcggatcagtcgtatctgcgcgtcatccggcggaggcgaggtcgatcgggtgagcttcagcagcagggtatgtcggccgctcgcacccccaactgatcaagtccgaggagagcaattcgtcagcagcagcctgcagccagctcgtctggctgcgtcgatggagaagattgcagcgggcagagggtgctcgggcaagatgcggtcggagggacgtcagctctgccccgcaccgtcgacgccgtcggccgccgtcgccgcttgggctcgctcgcctcccccgcacgcagaccggccctctccgccaccaccgcacgctccaaagaagagggctgccagacaccgatgggcttctgcactctaggtcgaatcgccaaaggaaaggcggtcatcgaccaaccgctcatgggcgggagcggtgttgtcggggtcctctaggactaatgcagggtcgacgaccgcaagggcccaagacctctccctcctgacccgttgacctctacaacctgcacactcgtgcgacatgcctgatctgtccttcatcctccagacgctcgcgctcggcgccttcctcctctgggccggccggcacctgtcgacggccctcttcccgagcgccgtcagcaagctacccggtcccggccggctgcacttctggtcgggcaacctcaaaagcgtcctcaacaacgaacccggccaggcgacgctcgactggcacacccgcttcggcaaggccattcgcttcaccggcttctccggccaggagcgactctctcttgtgcgtgtgtctcagggggggggggcgcgcctgccctggtccagtcattcctgacccgttcacttccccggccctccggcagatggacccggccgcgctgcatcatgtcctgcgccaaaacagttacgcgtacgagaatgcggcttcgcgtctgctcgtcgacgtcctcggcccaggcctcatctgcgccgagggcgatgtccacaagcgccagcgcaagctcgtcaacccagctttctcgccagcccagatcggcaagctcgagaagacgttcgagtcggttgcgcgagacgtgcgtcttcagaagtctctgtactttcgctcgagcttgaggctgattgctgccccttttgcagctgaccgaccgggtccgcggccaagttgtcgaggaagcggcgtcagacgccagaactccgtcggccgagctcaacatcgcgccctggtttacgcgagccgcattggacattcttggcctcgctgcctttgcacacgattttggcaccctccagggcaaggaggacgagctctcgcaggctcttgagcatggcctgtacgtcagcttcgcagccgtagcttctgacgactcgcctgcgactgatcatcggccggccgcccttccttgcaggaccaagacagccggccaccggctcaccaaggctttcacgctcgccaacgtcctcattgcctggttccccttcctgcgccatatcccagcgccgacggtcaaagcaatgcgcgtctcgcttgccgcgacgatgcgcgagtcgcgccggctgctgggcgagctgcgcaaggtggccgaggccggtggcgttaacgacggcaaggacgtcctaagcttgctcctccgatcgagcgaccgcgtcgtcgccgacggcctctcggacgacgaggtcctcgcccagatgtcgacctttgtcgtcgccggacacgagacgacggcgactgttcttagctgggccgtgcacgagctcgttcaggacccgcaagcacaggcccggctgcgggaagagcttgagcaagcgaccgccggctttagactcgacggcctgccgtttctcgacgcggtcattgtgcgttgcgcttcattcggcgaggtagcagtgctgacgcatcgaggctgcacttgtcttgcctctgcagaaggaaacccttcgcctgcacccacccgtcccggccctcgtccgccaggcgatcgccgaagacattcttcccctctccgagccagtcacactcgtcgacggaacgaccaccgaggccttgcccatcagccggggccagttcatctacatccctctcgcctcgctacagcgatcggccgacctctgggggcgggacgcggacacgttccggcccgaacgcttcctcgaggtcgcatccgaagaagccgcaagggagcggaaggaaaagacgaagtacgcactctggggcgacttgctggtttttggcggtgagtctatccggaaacccaccgacgcctgaggtcgcccgactaactgtctgcccggcacaggcggtccacggagttgcgtcggttaccgtttcgctctcgccgagctccggcacattcttgcggcgctcgtccgcaactttcgcttcgaaccgtgtgccgagccgaagggtaagtctactccttctctcaaacgccactcgagtcggccatcagactgatgtccagcttgcctccgccacctacccggttctcagacatcattggccgcgtgagtccgctgatagcccggccgtttgtccgcggtcgcgaggacgaagggtcgaccatgccggtcaaggtgaccgttctcgaccggctgctttgagcagacccggggagggaggagggggggtgaggtatttcttggaggggttggtgggggaggacgaggacggcgtcaaggacgacgacgacgacgaggaagagggagaggaggagggagaagaggagaggccgatgacgctcggcgaccatccgttcttcggcatcccgacgacgacggcggtggcggcaccgactgatgtatgatgacaacctcgttttatgattcctctcgctctcccttggcctggcctgctttcggtcgatcaaggctgatcgagctcagataacagggaggaaggggagaggggggtcatgcgaattgcttgaatccggactgaacgctcgctggagctcggcccccctcgtcctctcccttcagcgcccgatgcacgtcatctgtaggacgacggcctttgccgagggtgatagccacgttctcgaaggccgccgacacaacctctgcgacgagggacaggccgacagcctgtcggtcggacggacgagcgagtgattggagtcctctagtccggccagctcggtcaggactgcgccagccgaatgggccgctcacacggttacgacgagtgcgcgagcgcctgggatagagtccctcttgaatggctcgtccggcttgggcaggataggaggtgccagccgacgagctggaagccgacgagctggaggagcagaggtcgtcaaaccagcgtcgcgttggccggcgacctccctcaaccgaccgaggaggagagtcgtaggcagccagccggcccatgcagagcgtgcgcgtcgagcgccaggccgctggtcgttccaagcgccgagggacgacgttttctcgtactcacttcgcgacgaccttggtgcgaggagggggcggcgacgacgatgccatcgcaatgacgctcgcgcggttgaggtcgacggaagccggatgcgcggcagcagcggccggctctgcggtgccgtccgtccccggtgcctttgacttagacacgacgtcaacagatgcccgcgccgcagtcttgtccgtgaaggccttcgaggcgtctgcgacagcagaagcaggagcaagagcggcggccgccgccggccttactactgccggaagctcgtcgtcaacgctgatgaaccgcgtcggggcgaagccgagcgcttgctgctggaggatctttgggccgaggacgatgatggtgtggccgctggggatcaaagggtcgattaattagctttggcggggcggaggggggttggtctagagcgagtcgaagcgcttggacggacctgtctgcgagcttggcaatcgtatgcgagtaacggcccttgctcgtcctacagggaggggacgcgtagccgtcagcccgggagcgagaggaaagcgctcggccacaaagacacgcacagcaggatcagcgtcgccggctcggcgcggtggtcaaacaacgtcgtccacatgtcggtgatgaccgcttggtcggcgagtcggctgcaaaccagagtcagcctgtgagagggcaagacggaagggggcaagcgacgtactctttattgatgatgatgcgggaggtgaagccggcttcgcggatggtagacttgtcgcgcagatgctgaccgtcgaccactgcgatgacgagaacgacagaagggcgagatcagggcgtcagttcaggcgtcaggtcagacggagaatgccacaggaccgaccgtcgtacaagcgcatcagcggtcgcgggtcattcgagtacttgtacgcgaccgagcggaggatcgacgccgcccggccgagcgaggcgtcaggaaagagccggccgagggcacccttctcggcaacactcgggtcgctcaacgtctcgcggtaaactggaagcagggcgcccacgatgagtcaggaccaggcgagcagctatcgggagaaaggggggggggggagccggaccatcgtcgacgaagatgtaagccttggccgttcgggtcaccgagaggtcggtgaggttcttcgcgatccattcgtggtcgatggctggagggtgtgggacacgcgcatgagcgactgccctctggcccaagcgagcaaaagagactgacggacgtcgacctccgagtcggcatcctgcactgggttgtctgagatccatttcgctttcagcagagccctctcgatcggacccgtcacgcgggcgggaggtttgttgaaggccttgatggcggcggccctctctgcggcggtggaggctttagcccggcccccggcaggcgtcacgagcttcgagctggccgcaagcttgttgaccccataaaaccggccggcacgggcagttggctcgcctggaggacacgacggtcaagcggatcagctcttgaggtcagggagggctataatgtgacgcagggcttccgcaccggtcgcagtctggccagcaggttctttgatccgcctaggaggtggcgaatgcttcaggaccaacctcactgcgcaaggagaggacgcacgtatcagcagtcgagccgagctcagatgagaaggggcaagaggcatgcaccacgcatgaggcgtttcacacaatactgttgaacatgttcaagatctttcgccgtatcaaagaaggaaatgacgtcgttaatcatcgcggttgcacggtctaagcaggaggagcgtctcgttaggcaacagtatcgaggccgagaaggagtcggacgcaccacaggacgacatgccagctggcatcggcttgacggcgatggcaggcggcgcgacggcgggcccggtaaccggcgcttgcacgtgcggcgggaccgccctgccctcctggatcaacggcgacacttgccgagaagacggtgagcgagctatgacagagctgcgcggaagggcgagcggtctcgcaggatgagggcgaagcccaaagccggcccttgcccgtgcggcacttgacgcggccaagcactccgtctggcttgctgcaggggccgaggcaccgtctgactcgatctgcgctgcgatatccttgtgaagcgcgctcggaggccgctcctcctcggccggccgggttgagctctcgacggccaggccgctagcgaccgcgggctcgacgctttcccggacgagggctgcgagggcgttgtgaagcttgctcgtgggccgctcgacgctcgatgtcgaggcctcggcatcgatgggcttgctgggaggcaccactcttgcatctgacggctttaagggcgacttggccgatggcgaaggcggcgtcagcggcgaggacaccttgagggtggccgcttttactggcgccgctggcggctggcccttgtcttgcatcaggaacttgttcctgagccgatgatggacaggtaccgctagtggctccgtcatcatcgagaagttggcgagcttgccccgaacgggctcgtcgagcgtcgggctcgagctgaaaggggctaccgctccgcatccctgctggccgatgaaggacgaccggagcggccgatgtcgcactggacagcgcgccaggccgactagcgaggtccgggcggtcggcaggtgcatctgctagagggcgagagagaggagagacgggccggggacgaggcgtaatagtcgctgtgagggtcgtcggccttgagctcggagttgagccctgcgggtggtcgaggatcgaaatctcggcgaccccaaaggccggggaaattgccggggtcgtctaggtttaggttaagatcgggtatcgctttgcgtctgtaactcgaacctgcctcatgagcggacgtcgattgataggtcgggctgactgacctcggttgctgaggtgcagggagcgatggagctagcggccgacgcccagcgagagcgacgacggcagggtagggacatgctgcgcggccggctcccagcctgcatgcctttctctcttcgccctctctcctcatctcgttgcccgagcagcgccagatggagcagaggatccagtcacgacagaactgaccggattcctcctcttcaccccccgacggcgaggtgcagcagagagcgacaggcgcagattacctgcgcgaagcgaggtcccgcccggcccgggctgccgggagccgtcgagagccgggctgcctccgctcgtgccctgtcaacctcgagctcacctcctcttctctctccttcacttccacctcactctacctcgaatgtttcgcagcgcaacctctcagctcgctcgcgcggccggccgtcgtgccgtcgcttcaacctcggccgctgccggcgcaagatcgtccggctcttcgtcggccgcaggcggcttcagccgtcgagtcggcaccgttcgtttgaaccccaggccgtcttataggctacaggtccctcggactgacatccttgcttacctctggcagatcctggcgacgacgtcctcggcactcgccctcgctatttacattgacagacgccggctagcgacgatccagctcgacgaggcaccggccggctcgagctcacgccggccgatgcgacggaccgacctgattgcgatggctgaggtcgagacgcacaacaaggagggtgacctttgggtcgtcatgaacggtgacgtctgggatcttaccgaggttgatccgagtcgtcttcttgcaggcagcattgcaaagcccgctgacactcgcttcctcccccgcgcgcagttctttgaggctcacccgggcggggcgacgccgttgctgaaggctgcaggtcgcgatgcgtcaaatgtcagtccccttgacaggcgtaacgagatccaggcagaggcagactgctgaccctccaccaacaggttttcaacccgctccacccgccaggcacgattgagggcgcgctcgagagcggttcgctccagtcctcagcgctcgtcggccgggtcgacccagcgacgatcaagcaggtcgagcggcccgaacagggcgaattagtcgacgtcaagcgggcgggggccgaggagaaggtcgatctggcgatgattattggcctgcccgactttaccgaggcggcgcgcaagattctgcccgcaaaagcgtttgcatactactcggccggcggaacagacgagtactcactcggcctcaacaggtgcggtctcgccatcgattgcttctcgcttcccagcacgcactgcgctgacattcccgccaccccgcaggtcggtctacaaccaggtgctcttccggccgcgcgtcctccgcgacgtcacgaccgtcgacacgagcacatccttccttggctacgacgtcagcctgcccatctttatctgcccgtgcggcatggctaaactgagccacccggacggcgagaaactgtttgcgagcgccgcgggcaagacgggcatcgcccagtttgtgcgtctcggtcgactggtggccgacagcccggctgacttacactaacactccctgtcctctccctttaggtctcgaccaacgccagcgcgcccttgaccgacatcctctctggcgctcagagcccagaccagcccttcttcatgcagctctacgtcgaccgccagcggcacaagaccgaggcgctcatgaagaagattgagcagtcgggccagatcaagggctattttgttacggtcgacgcggctgcgccggggaagcgtgaagcggacgagcggtcgagggctgaggtcgaagtcgtgcgtcccccttccgacccagcttatcctggaaatcggacgcagctgacccgaccatcatcgcctgctcatcttcaggcatcgggcatctcgggaggcaagatccagagcgacgcaaagggtggcggcatcggccgctcggtaggaggtttcatcgacccgaggtacgtcagtcagtagttttcaccatgtagtcagcctgacgtcccgccgtcattgcagtcttaactggtccgacctcaagtggctccggacgcagaccgatctgccgatcggcgtcaagggcgttcagacggtcgaggttcgtacccctcgtttcgcccttcatccttttcagctggctgagcaactgctgctctcccctcgcctcgcttacgttcgcaggacgccaagaaggcctacgacgccggctgcgacgccatctacctgagcaaccacggcgcgcgagccctcgacgggtacgcacccaccccttcagcctacgaagccgtcgtcctgatcatcgtcgtccctctctgcgcgctagctcgccgccggcgctctacaccctgctcgagatcaacaagttttaccccgagattgtcaagagtcagaagtgcgagatttacctcgacggcggcgtccggcgaggaaccgatgcgtgcgcccttcttgatctctctctctctctctctctctctcgatggaggaagtgctgcagaagggatgctgacaacccttcgttcgtacaacagcgtcaaggcgctctgcctcggcgcgaagggcgtcggtattggccgaccgacaatgtacgcgctcgcctggggcgaagagggcgtcatccacgctatcgagagtcagtcccttcctcctttctcaacctctgccacccactcaccccccctcctcctctcttgcctcccggcggccagtcatgcgcgacgagattgagacgacactccgactcctcggcgtcacgcgcatctcgcagctcggcccgcacttgctcaacacgcgcgcgctcgacccgctcattgccgagcgtatccaagtcggcgaggacgagaagggcttctattgagtgcggtttccgaggtcgaggaggggaattcgtgtatggtacttggtctactgctgctggtgctggcgctgctggtgggctctcgtcggtcggcagagagttgctgccgcttcgttcggtcccgacgaagccactcttccacctccgtccatggttcggctgaacgacttgcagagcttgccaggccggcacatgcaagaagcgaggtgccccgaccaagcgtctctgccccgcagctgattcgttggccggcatttgttcgggcttgattaggcggagggaggaggcagcggtcgatcgagaggtgcaagaggccccgagcggcgagggaggggaggagcgcaacggaagatccgcatccgcgccgtttgccagcctggcagggcggcctgtcattttttctttcagcagaggcgcatctgtcgcgacatcttgtcctccctcctccaccccgtcccggctggctggctggctgactggctggctggtcgcacgagccaagaagcatggtcggcggccgatctgaaggccaggcccgacgaccgacgggtgcgttgtttgcggggtctggtctggctggcgggggcaagcaggcctgggcgtgctgcgcggccgggagggctgaaaggtctgcccgcaggcggcctgcttcctgcccttcttctccccccctccgacttgctcccacaactcccctctccgccgccaacctaccttacctccttagcctcagtacgcgatgagcagcccagcgtcctcctcgcccaaggtggtcgagagcgccgacccggcccaccacgctcactcgctcgacggctcgaccgtcaacgatgacatgctcgtcgaaaagcgcttcggcatcaaggtgcggcgcctctcttcccccccttgacgttacgccgccctctctcgacgtgctgcaagcggcgggcgcgcaacagacagacctcgctgacacccacctgccctcctgccatccgtctccagaacgagttcgtccgcgagttcggaaggtacgttgcgcgcgcgctccacccgctttggcccgtgcctgcgaccccccgggccgagcctcttgccttttcgatcctgacctgtacaactgaccgccctacctcctccttttcctttcagcctgtcgaccttctcgtttgccttttcgatcatgggcatgtgctcgtcgatcgcaacgacctttgacgtcgtgcgtcttgcccctgccctcctcatcgagcgacccgcgcaggcgctgacgaccttgctgccgacgaccccttcacctctagccgctgctgtacggaggcggacccgcctcagtcgtttggtgttggttcatgtgcgtcgcgtcgggccacgaggagcgtatcgcactcgatgctcgtccggtcgaactgacgtccccccgctccctccccccgcgcagcggatccgtcctcaacatgagtcttggcgcctcgatgtgagtctcgacctattgagcccaacacagacagtcgagcgcaggaagctgaccccgccctccttgcttcgcttcagcgccgagattgtctcggcctacccgacctgcggcggcgtctactctgcctccgcctggctcgtgcccaaggtccgtctccccttgcccttcctctccccctcgcatcctgacacccgcccttctcccacgcgcaaagaaacaccgcgcaatgaccggctgggttgtcggctggctcaatctcctcggccaggtcgctggcgtcgcctcaaccgaatggggtctctcgcgcatgatcttctcggctgtcgcgatcgcccggcctggcttcacgtacacgaacgccatgcagtttgggctctactgcggcctgctcgtcttccgttcgtcttcgccccttctgctgcactctgcgaccgtctgctaacgcccttgtgctcgctctcccttgatcagacggctcgctcaactcgctcaagacgcgcgacctcgccttcttcaccaagttgtgcgtcctccccctttcgcttgctcatcaatcgcccgcagctgacatcctctgctctccactctccccgcccatctcagcttcgtcttcatcaacattggtttcaccttcctcatcattatcctcctgctcgcccttaccccgcgcgacgagatgaactcggccgcctacgtcttcacatcgacgatcaacgacaccggttacaaatcggacggtctggctttcatgtttggtctcctctcggtccagtggacgatgaccgactacgacggtgagcactcttgcgcgcgcccgcttgtcatttcagcgactgaccccttttctctcgtgccccagccgtcgcccacatctcgttcgaggtccggcgggctgcctacgccgccccagtcgccatcttcatcgccgttgccggcaccggcatcatcggctggctgctcaacatcgtccttgtcctctgcatgcccgacatcacgacactccccggcgccggcgcgtcgtccttcctcgaaatcatgcgcgtccggatcggcctcgtcggctcgcttgtcgtctggccgtttgtctgcctcgtcgccttcttcaccgtccagacggcgctgcaggcaaactcgcggacgctctgggccttctcgcgcgaccatgcgctccctgaccgcggcttctttggtcggctcaacaagacgacgaacacgcccatctatgccgtctgggccgtcgttatcttctcggtcgctctcggctgcctctcatttgcgagcaccgttgccgttagtcctaggcccgcccttcctttatcgctgcagcgccccgcactgatatctcccgccccttgacagatcaacgccatcttctcgatgtgcgccatcgcgctcgacctttcttacgtcatccccgtcatctgccggctcgtctaccagaaccaccctgaggtcgtgagtgccggaacgggtgccgtctccccacctccctcctcgtttgctgatcccccttctactctttcgcgccgccagaactttacgccgggaccgttctacatgggcccgatgctcggcctcgccgtcaatctcgtcatgatcttctggaccttcttcgagtgcatcatcctcgccttcccgaccgtcaacccgatcacgaaggacaacttcaactattcgtgggtcatcacgctcggcgtcatgctcgtctcgctcgtttggtactatgcctcagccaagaaccggtacattggcccgctcaccgacacccagcgggccgaggacgccggcgactttggcggaccgggcagcgacggatcggacgtcggcggcaagactactccagagaccgaggccgaggcgccgacgttcctcaagcacaagtaagggcgctctctgtccggccctgccctccttttcccccaccctccccttcggggagaggagacgtagggggaggtgcgaatggcggggtggatgacgacgtcagtctcctggaaggagatatcaggagaaggatagaaagtggactgacattgacaatccaagacgtcccggccaagtgaagcggtgcgagctcatcgtcctcggcggcagcgacggcggcggcagaagaggccgggaagaagagggcggcagcttgctcgggcgtgatgacctgcatgtcgagctcggtcggttcccttcccgagagacaattcaaattcgcgtcagcctctgcccaccagtgtctcttgctgctgatcgtttcgagactcacctcgcgcggatctcagcctcggcgttgccaaccgggacgccggtcgacgtgatggcccggatggccgggaacgcggtggaggggagggacgagacgaggtagaaggtcgtgttgagctggtagaggttggtgagggccgtccagcctgtgtacggaagggagggtgtgatgtagggcgagtgtcagatgacgttaggcgcggagccgcggcaagggggatgacatacctggcgcatgttcgacgaccgtcgtctcatctaacgtcgacctcctcccagaagctcctgatcgaccgacttgactcaagcttccgctcgcagagtggccgaggcggtgcagatgcatgctgagcgagccgaggcgccgagggagggcaaggttgagagggatggagaggacgatgaagacaagaaggagcgcggcaagcgtcgagccgagggcgatgcgccgcaatgacctgctcctcgagctgctcgtcgtcagcgatggcggcggaggcgagcccggtagcctcagttgcagccccttgctcgtcgcagcggtcgtcaggaggagcgagctcgagctcccctcccccgccgccgaggacgacgacgacgacgacacaggcggccggctcttgccgacacacgacggcttgacgaacgatggcgagagcgggccctgcgggatgggtgcgaagaagcgctcgtggtcggcttgctgctggcggcggagggggaggaggggtggcatgagaggcggcaggcggagctgggcgaagggggcaaaagagggatggagagcggcctgctctcgtcctttcgctcgcttcttatagactgcccggctgtcatcaaagggagcgaagtcggtcggcgtcgtcgttgtcggtcgagggggtaaggcgagagggcgaacaaggcgttgaacgtcagctaccgatgccaccgccgcgccgccgtgcagagtgtttcacggggcaggcgaacaacgaccggccaaccaaccgaccgggccgcctttgatactctcgagagcacgacaatcagccgaatccacgcttgcgcacactgacccttttgacactcttgctgctctcaggatcgatattggtcgtcgacaggcaggaggcgtcgggcaacagggcgaagcaggcggccgggcgcgcaggcgcagcagcccaacgacgtgcgcctcgggacccgcgcgcgcgctcccgccccccttggctaaccggtcaccatctgattggatcgcccccagacaggttttggcagcctctcctgaattataggaacccagcggtatcggtctcgcagcgatccgataagatcctgtaaacagatcactcggcccgcgcaggtgggggacccccggaccccccttacaaggctttccggccgtccctgtgactggatcgccggcagactaatttccgcatctctcctgatcctggccgaccagcctggcaaagtcccgtgttgatcgcatacaattcggtaaaatcgcatgtgccccttgcctgggggcgactaaacatctgcctctgcccgcttcgccttcttcgcccgcttgcgctcagccttctcggccgctgcagcctcatcgtcgtcgtcggccgagcgcttctttgaccgcttgcttgatttggactcggcctcctcggacggttcgctcgcggccggcgtagcgactgcaggacacaaggcaggtcagcatcgaccacaggagcctcagaaagcgacccgacttacctccgctgctgctgctgctcttggccgccttcttggccgcccgcttggcctccttcttgagccgcttagcctcctcctttgcctcggccttgagccgcttcttctccgccttcgccgccgccttgtcgctcgacgcaggcgcgacattggtttcgtcgatcgccttgcccttacccttcttgctccgcttcaactcggcctcggcagcggcggcgacggcggccggctcagcttcgtcgtccgactcgtccgacgagcccgacgtctcggcctcagcctcgggcgccggcgctgccagaggagaaggagcagcgaccggcagagcatccacgacgaccggctcctcgaacgcaacctctgcgacatcaagcgacgatgcgggcgagacgcccccgctcgcggccgcagcgatcgacgcgaggatcgctgccttcttcgcctccatcttgagcttgaagtagtcctggacggtcgcggccgtcttgttcttgacgatcaagtcggcgccaaacgtgttggcggccgacgaggcgccgccgtcggtctcggatcccgagccgcctccgggggcgggcgaatcgcgcggcgagtcgaacggcgtcgagggcgcagacttgatgccgaggatctcagacatggcgagcgcattctgctgcgaggccagctgcttggcgttgcgaaacttgttgcggtggctgcgagggaaagaggggtgtcaacggatggtcggaggagccaggccgaggggaagggggactcacgccatacggctcggccggccgaggacggtcgtggtggtcgtcgagctcgacgcgcccggcgacgacgtctcctcgcgaacgacgaccgtgtcgacgttgcccgagccgatcacagagcgggcaaagccgctgagcgtcttgcccttactggcctcgccctcgctgctcgcacccgactcgcccgcctcggccgcctggagccggcggaggaggtcgtcgaggttcccgcctgcgctcccaacaccaccgccctcgacgcctccctcacgtcgcgcccggcccatgccgataccggacgagtcgatcttgcgtgcggccgcgatagggttgacgaggccgttgtccgagaggccgagcgaggtcccgggcgtgtggccggccttgaggagcatctgggcgccaaacgaggtcgagtcgtgccgccaggcgaggttgcgcgggtcgagcccaatcttctgcttctgcttgcgctcagagagacccatcgttgctggagtatagggaggagtacgagaggaagagggctgcgggctgtcgacgttcggagagagagagaggggcaagcggccggaaacgaaattgcttcgggcagccgccgcgcagcaggaaacgccagccagccgacggacgaagccgccgcccgcctgtcgcaaggtctcgccctctcgcaccagacgggtctacaggcaggtgagaacagagagacgagggcggcatgaagatcaacagatagaggggccggagggagggcatgcgagcacgctggcaaagaggcgcacgcctgctgctgggctcgccgcgactgcattcgagccggccttgtcgtcctaactgtcagcgcccaccctaccttcttgacagctgcaacagcatgcacgacgagccgatagacggcgcgggacgaccagccgttaacgggaagaagaaagccacttgctcgactcccgtgagctcaaacgcatcggcctcctccgtcaacagcccgccgccaattcacgaccagaacggtcacccaacatggtacctcaaggcggcggccaagcgagaagctcgggagacactcattccagcgggatggtggcttcctcaagcgctcctcgaggcgctgccgtcgaacgtgcggccggtcccggcctcctgcgcggtgctcagcgcgctcgagctcgcaatcaccgaggaggacgacgctcgcgccctcgtcggacgcatggccagcggcgagctttccgcggtcgacgtctgccgggcctactgtaagcgggctgccatcgcccagcagctagtacgtcgtcttcatgctttgtgggaggtggccgcgagagtcttgctcgctacgctgatcgcccacccgctcctccctcgcggcagaccaattgcttgaccgagatcatgtttgactcggccatggagcgtgcgacccagctcgacgctcattttgcgcgcacaggcgagcttatcggcccgctccatggtctgccgatctcggtcaaggatcagtttgacgtcgccggcttcgactcgaccatgggtcagtctgcacgcaccggccgctcatgctcaacctgcctgactgacctcgatctgcgcctcctcccgtcagggttcgtctcgctgattggcaagccggccggacagcactcggtcctcgtcgacctgctcctcgcgcttggtgccgtcgtccactgcaagacaaacgttccgcagacgctgatggtcgacgagacgaccaaccacgtctttgggccaacggtcaatccgtgcaacaggcggctgacggctggcggctcgagcggtggtgagggagcgctcgtcgcattgaagggctcgattatcggcgtcggcaccgactggggtgcgtctagacggccgacttgcttgcgcgggccagttaatctctctcctctgcaccgcctttctgacgctgtgcccgtctcactcttcaggaggctcgatccgcaagcctgcagcctactgcggcctttacagtctccgtccgacgtcgcgccggctgccctacgaaggggcggccaacgtcttcaagggcctcgagggcgtcgaatcggtgctcgggccgatggcacgctcgacgagctcggtcgagctctttatgcgcgtacttgtcggatccaagccctgggagttggattcgcatacggttgaacgcgtgcgttcgaggcctgcgttggccagtcgtggcgcgaagttgaccgcttcttgcctcgccagccttggatgcctgacggagacctcgcgcaaaggaagctccgggtctgtatcgtccgagacaatggcatagcgcggaaccatccgcctgtcgtccgggccctcgaggaggtcgcctcggccctcatcgccgcaggtcacgaaggtgaggcctgtcgtcccttattcgcttgagtccagactaactggattatccgtttgcagtgaccaactgtcctcctctcgagtttgacttttcgcgtcggatgatgagcaagatggcgacggccgacggcggcctcgacatcaaggccttcctcgaggcgtctggcgagcccctcatccgcgaggccttctcgccgctgccgccaagcacgccgccctcagtcttcgagtaccaccagctcgtccaggagcgggacgccttccggcagcgctttctcgcgacctggcgcgcgacggccgggctctttgcggcctgccagccgatggacctcatcctttgcgccgtcgcaccgcacctcgccccgccgttcctcggcgcccctcggccagcagagtgcgctctctgcctttttgcagaatgtactgccgtacttacccttctcctcgttcacagactcatcgtcgataccggcatcttctcgctcctggaccttccggccggcacgatgccggcaggagcgatcgaccctgcccgagatgtgatcgaccggtcgctgccgaccgacagcctctcgaagaatccggccgatcgccatcattggaagtcttgtccgtgacgccagccctctctgctcgcttgtcggcttgctcgcttgctgactgttccctcttcctcccgcctagacgaccccgagacgttcgccgacgccccgaccgccgtccagctcgtcagcccgcgccgtttccgcgaggacgacctgctgacgatgatgcgcgtcgtcgaggaggctctctttgcccagcgccaatattcatgacccttcgccctcggtggcctgccgaggcgccgtcaggggccaggcttcgcggtcgaaaggggctctttgtatatgcaaaatccgcaagagacgttcagggcttcttgtgccggtaggtgatgccgcagatggttccggcgacctgcatgacacctgcagagagtggggcgggtcagcacttggcaacgcctgtcagcagcggcgaccggacgcaccagagaacaagagcaaggctccgaagcggtgaaggccgtagctgcccgtgccgccctggaagaggctcgacttgaggagcgagctcgcgatcggacctgaacaaaagagcaagggaccggggtcaggactcgatgcgggtcatcaagcgaaatggcgtgagtccgaggaccaaccactggcgatgttgcctgtcgagcgcgaagggagaggttccgcaaggtcagctcgcagcctgcgccagttaaacatgcttgtacgacggaccaatcccgcgagaaaaggcgaagatgctgaaaatgaggctcgggagggtcgggtcgtcgtctgacagtagggcggaggttgggcgtcagcatcgacagtcacccgagattgcgagtaaggcagtcacgcacgggagatgatcgtgataagacgcgaccagagggctgtaaaggcaagaccagtcgcaccaaagaaaagcgaaaagacgaccaagagggctgacgaccgtccggcaaagccccagaggaagatcgaggcgagcgccgccccgccggccgtcaggacgatgacgacgcgcgtcggcagcttgtcggacaaaatcccgaatccgaggagcccaaaaacactggcagcattcattattgcgaccagcgttgcgccgtcgggcttgctcttgatctcgctcgcgtagctcgcgagccagacggtcggcacaaactgaaaagacggccaggcacagagatcaggggacaggagccaagcacggcagatgctagaagatagacgcacgttcccgagcgatgtcagcataatggccgtgacgaagctgtaaattggcgagcgctggaggaagctccagttgacgcgcgcccggcggtgactggcattcgcgcccctggcgattggcagccgcggcttgatgcccgagatggcgatgcttccggcaatgccatagccgacgccctgtgacagatggaagagcagatcagtcgctgcgtccaagagtgctgacgagagcgactgacgagagcgatcatcgacgccttgtacgagaagcgcttgagcaaggccgacatgatgaaggctgcaaacggcaggcgcctcgtcagcttctccaaatcccgttattgcagtcgagcagcacttgtacgtacgaaagactgtcccgccgacgccggttccggcgtacaggatgccagacgccatgccccgacgctcggcgaaccattcctgcggtttgttgagcaagccccgtcagacatcgtgcacagccagagcaagcgaatacaagactcacgaataataagacgacagcaggcagatacaacaggcaggagatgggatagatcaagccgaggcagataagcaggtgactcggctgaaggatgagtgtgggccagtcagcgttcgaagccgggcagctctaaaaggccggccccgcgcgcaccttcgtcgcaaaggcgctgccgatcaacccgccgacggcggccgacaggccaaagagctgcaagtgagccctgtggcgcgggaagcgggcgagcaaaggaccgaagaaagagcaggagaggtacatgaggccggtctgcaggcttcagggatcgatagaggaggccatcaggccaggacgatcacggcaggagaggggggagacgcacgtcgcggcaagggtgagggtcgcctcggcaccgtggtcgtcctgaaagagttcgttggtccaatagctgtgaaggacaccgaccgagaacgggaggcctgtcagagggagccgatccagcagcagcagcgagcccgtcagccctcgttcttgcgcgatcgctcactcgaacgacagcgaagcagcttgcgagaggacggaccccatacgaggacctcgatcgtcgtcgccgccgcgaggaagacccaggcgtcgcgcccgccgtcgacgggcgggagctgcgagcccgggttgaggctgagccggtcgggcgagctcgcgcgcgagaggctgctcgccgacggcggcgtcgtcatgttgctgctgtcggtccggatcgttgctggtggtaggggctggagttcgatctgaaccatggtgggcaggcggggcgagcgagcgagatgggcgttaggaggagcaaagagggtcgagaagaaagcagcgaccgttcgagtcaggctgggcggggcagaccggaccgggtcgactgcgcgcgctcctcgtttgtctcgggccgacaacgccgactgctggcacgcgcgtgcgcagagggtgagggaacgtattgcaataaggtggtaagggggggcctcacgagggcggcagcaggttgctactacagaccgggtgacgcttgctacacttaccctgctgacgacagtctgtgacagcacgcgcggccagctacgagaggccgccggacccgtacgcgccggctcggcgtccgtccgtctgtcgtcgacggcgcgcggcctctcattgagcgacgaagcaaacttgcagatctcgaacacgcgcgcccttgactgctctatcactttgggcccagacgggcgtcggggactggcttttgggcgagggctgtggcgtcgctactctctgtagggcgagccgaccgaccgtgagtcgcgaaagcgtcctccgtcgactaaagagcgaggccggacgccgtcatctagttgagcagagcacgagtacagtaggaagggggccgtctaaagcgtccggcagagattcctccctccgtcgacctgggcttggcagagcgcgagctcgagcggcattgacacctgaaggggagcccgcgaaattcgaagcgtccgttccggcagtggtggtcagcgacgaaagagcgtgtctttcgaggatgacgacgggggggatggagaggaaggggacgtacaagcgaagcgacgaggacgccccacgagtcgctcgctccaacgacgccgatccgccactcgcgctcctgctgtagtcgctcggccggcccaagcgtcgtcgccccgccgcgcccaagaggctcgtagcctgcctggtggccgtcagcgccggcggcgccaggttcctccccctccgctgctctggcgccctcgccctctcgcccgacgtgatggaacgtctggacgtaggccgtccctccacagagcccctcgaagcacacgacgacaagcagcggcccgaggccgagcgtcgggcgcagcgcctcgtgcaggcaaagggcgaggatcgtgccttgaaggagcgaggggagcgggaggagccggatgggcagggcagggaggccgagcaggtgcgaagagcgcgagatgaagacgaagagctggtaggtcagctgcaagggaggaaagagggactggcgtcagtcggaggggggggggtgagacaagggtagaagtacgaggaggccgcacctggtagagggggtagaagtcgcgcggcgtcttgacgagccagcggagcggcgcccgcgtcggcagctcatacagcagcgtcggagcgatgcccttttgcgatttccgagcagcgcgcgcgcctgaacgtcagcccggcccggtcctacgaggcaaatgatggaatggcgcgcgcgcgccgcacctggttgatcgtatactcaaagacgtagacggcaaagagcgggagcatgaagcgtccgatgagcggccgggctaggcgccacttctcggccgctgagagcccagcagccttcccgctgctgctgcggctgctggcctttacggcggcgcccgtcgtcgatgagcgagcgtcgtcgacttcctcgccgccgtcgtcgtcgtcgtccgaccggtccccctccgccaccgccgcctccttcggcttcaacacaaagaacaggacgcccaccatgccccccggtagtaaaccccccccactccccttcattcagcatcccaaacattcggacggtcttccctcatccccagcctgtctctcgcgcactgtcggcgcgacgtcgtcgtcgttctcgcccgctcctcttgccccgttttgcttcttgccccctctgattccgcatttcgctcgcgttctctatgactcctgccccttagtccgaagcgatcggacgcacgcgagcacgtcaagcattggatgttgaaacagcgcaccgctttcgcttgtgctgcccttcattagcctttcgtcgtcaacgctgacattcccatgccgtctgctctctatgaatcgctcgagagggggtccgggcacatcgacgtcgcgggaactgctgcgcggacggcctgcgccgagctgcctctcgtcaccgccctttgctagctcgttctccttttctccgaacgctcactccgtcccaaagcagagatgctcgtccgaaggtcgacgacctacgcgctcgtcctggcgataggtctctcggcggcgctcaccttcttctacatccagtccgactcgcggctcgccggcggcggaggcgacctcgccgcagacgacggcgacctcgccggtcgacctccgatacgcattggcaaggccggtagcaccgtcctaggcgagacggatgccgagttcgggatcctgccgatcgggctcggctcgccggtcgagcatgacatgctcgaggaggacggcatcgccttcatccccgataggccagaggacgccgagctgccgccgccgccgcccttacctccatccagcggtggctcgggtctccatatcgagccagtcgagcccgacaggcagacgtcccaggccaaggcgccgagcaaggatgtgacggcacccgctccggccgacttcccttacacgttcgactcgactctcctcgcctcgcgtctcgcggccttcctcgctcggccggtgctctcgcacgccgccgcgctgaaggccaacgtcgccgcctgcccgctcgagatccacgaccggcaggtcaatccggaccagctcaagggcgagcgtgagggctgggctaggctcactgaggccgacatcaagctgcggcgaaagagcctcgtcgaggcgctcgagcgcgcaggcaaggccggcgagcggctcgtcggcgaccccaaggccaagagcagcggccggggtctggtcatcgccggcggtaacagggtgcgtgagggtccaggagcaatagtgcgaggcttctgagggtgttgcatcggcactgacaatctggcctgccctcccttggtccccgctcaggatacgactgcgcgagtcatgaccctgctccgcatccttcgcaagcaccacaagtcaaccctgcccgtccagatcttccattttccgggtgagatcacggacggcaacgagcgcaaggagctcgagtcgctcggggccgagctcgtccagtttgagggcgtccagaagctcaacatctggaaaaacttccacatcaagtgcctctcaatcctcaagagcacgtttgacgaggtcctctacctcgactcggacaatgtgccgctggccgacccgaccttcctattcaacgaccgaggctacctcaccaagggccgggccgtcttctggcccgacatcaacagggaccacccagaaaacgccatctttcgcatcctcggcgagacatgcaaccatgccgagtggcagattgactctggccagattgtcatcgacaagcgcggcaacgatggtctcaacctcgccgccctccatctcgcgaacgcgatgcaaaccgatcacgagttctggttcaagctgagcggcggcgacaaggacaccttcgtgagttcccctccgtcggccttagctgcaccttggcgtccttccagctccgagactcgcgcatcagctgacgcctcctctttccctcctgtctaaagcgctacgctttccacatgctcggcctcgactttttgccgagcccacgctggctgagctcagcaggcgggctcaacccgctcgagggcggccgattctgcggcaacacgatgcttcaggtgcgtcgcagagtcgccgccgacgtctcccatcactcttcgcccttgaaattgactgactttcctcatccacttttcatcccttcgcctttgaccccggctttcgatcctcagtatgacctctcgtcgtcccctaagccactcttcctccacgccaacctgctcaagcacgtctcaggcgcgcgtaagggcaacacattcacacacgtcaagacgctcgccgagccgacggacgaggcggcgctcgatcgggcaaggatgtgggtctatgacgggcgagggaagggaatgtgtgtcgatctcgagacggtcaaggaggatgggaaggggaagggaggcgtcgaggtgaagacgtgggaggaggcgggcggcccgatgggcttcgaggcgctcttttacgacgagggcggcagggcaggcggttggtgagggataccttccgctctgatgacactattcatgactttgcgtgcggaccctctacgagccgccagggtcgggcaggcaagctcgcgttgcagaataagcggcccctccgaaccggagcttgtcctcctcaacttctgttctgccaattagtggggactaagctgctgatgtctgcatctcccacctcttgccggctctatgatctactctcgctgttgagctctcgtctggacttgggtcggaggccgcggtcgccgccccctttaatcgcgccctccgagcgagggctgagaccgctcggtcgcgtgctaacccttgttcgcctctgcccagcaccgtcctcgacctgtaagcctcgcaactagatcaacgcaaaggattcgagcggtcaggaacgccgccagagaaagcgaaatctcttctgcaccagccaccgccgtcgtccaggcactcttcggtcgccaaaggccgcgaagcgtcgtcgcgtccttgcgcagccgacggtcgggcctcctctgctctcgccttcccctctcccatctacacttcgcgccagccacaagagaccacttccgtacgagaagcttcggttcatgccgacgctcacgttgccgcccgccgccggccctggcgagcgggcttctcaggttctgccctcggtcgcggtcggtccctcttcccttccctctggcactcccctcgcttcctcctcgctcgaggccaacctgtcctcctcgccctactcagcagtccatccgattgctgacgactactcaaactcttttctgtgctcgccgagcagtgctcgacctgcaaatctcaggtctcgcttcttgacctcggctcgcatgtctgctctgctccgacccctccgccagcgtcggtcctgagtcctcgtccgcctcctccgcgattcgagcagccgaggccaagcccaggctcaaacgaaagctcggctcctcggccactcccctcaacgacccggtcgtcgccatctctagccggcttcgggcgaacgtcgttggatgagcggccgcgagtgtcgccgaccgcagtcggctcgccggccggtcgacctcagctgcagctgcaacagcagccagggcgagcggacaggagcagcgctgagcggccacctgctcctcgtcgcgcggcaacctcgagtgctatcccgacagcggcgacctcaggtctctcgccagcgggccgccggccgtcgcatgctatgccttcgccctcggcctccgcccgccgtgcttcgccgtttgacgaggatgaccggccgctcgagccgccgccaaacgttttctcgggcggaggcagcgggagaggcccgcgtcgccagacgagcgcgtcctcgctcggctcagtgcactctgcaggagggcgctcgacgggctcgggctcgcctcggccggccttcgctcaccctccgccgatgatcgaccctgctttcggctcgcctccatcgaatccttggatcctcaggccgtcctctcccgccctctcggctgcctcgtcgttcaacggcggcggcagtgccggtggaggttacaatccagcggtttcgaccttccaccctcccaccctctcgtacgagcacgagcgcgccccgcctaggcagccgagcgcaaacgtccttccgcccggagtctcggacgctgaggcctggcggattatgcaggaggccgaggcgggcggaggcgcagggagggcgggcgtcggaaggagggcgtttcacgtcgcgcaggcgttcaaggaccggcagccggcatccgcggctgggagcttcccgttgcgaggtttgttcaccagcttcggatcaattagcctacatggaaactgaccatcgtcgtgagccttcatgcgtctgcagtcgagacctttcccccaccagtgatgcccgctgcctcggcctcaccctcgtcgtactcgcctcactcgccctcatcaggaccgacccaccattccatcgtcgcgccatcgccggtgttccagttcgagcactcggcgggcggttcagcttcgtcggccagcggctcaccccgcgggctgccgaacaaccgggccggctcgccgttctcgcatgcagcttctcaaccgtcgacctcgacctcactctcatctgacgactatcagcaggccattcgcccctcgcaggaaccgcaccagctagaacagcggccgggctcaatcatcgacaagcagctcaagccgcaaccgtcggctgaccggcctgcttcgcacgatcgcatctcgaacgacgacgacgaggacgataacgagagtcgggccggaggtgaaggcctcggcgagaacttcctcaatcttggcgaactctcagatgactcggacgaggactcggatgtcgacagtcgaccgctgcctgccgcatcgctacggagtggcctcctccgggcggtccaggaaggtgctgcgagcagcggtggcggcggcggcccgcgtttgcctcctgcggaccattcgagctcacccccgccatcgtccgcttcgagagagacaggctcattggaggccggccgccgccagcgttcgatgaccaactcggccacttcgagcctctcgtcacctctggcaccgctccagacttccaacaggctcctcacgccctcgagctcggccgaccgactcgcgcgcggcaacggcgacgatgatacggccgaaaactccctctcgtctgaagggatgggcacgctcgagtcgatggtcgacgccatgcgccaggagcttgcggtctcgtccccttccgcatcggcaagctcgccgacctcgttcccgtcatcgccgtctgactctcgcgacgacggaccgcctgcgcctctacctgatgcggtgccacaaccgacggtcgtcaggcgacgaaaagcctgcctacgctgcggctgtgaggtcggtggccggaccggcaagcgcttcgtcgctgtccaggccgacgaggtcgctactgagggcgaggaagctgctggtcacgcgcctcagcctcagcaagtcctttgcgaggccgactggcgtgaactctaccttccaaagtgccgccggtgcgagctcgcgatcgagtccgaggccatctcgtcgtctgacggccagctcaggggcaagtggcaccgagcgtgcttcacctgctgggcctgtaactcgccgttcgagacagtcgagttccacgtctggaacgatcggccgcactgcgcgctctgctaccaccggctcgggggcacgctctgccagacgtgcactcggccaatcgagggcgcctgtgccgtgctcgaaggctcggccggccaagccctccgcttccatccgccctgcctccgctgcgaccgtctgtccccctcgcatctctcgacagtcaagcaatccgcgctgacctttactctccctctctcccgggccctgcagacccgtcttgtgccgctccgatggacgaacgctatgacctcgccgacggccgccggctctgtgccgaccatgccgcacaggcctgggcaacccaacaagaggacgtcgcccgtcgctcttcagctggcttggacgcgctcgccgtcccgggtctgctcgacaaaccgcggaagcgcatgacgctcctcgtcaagctcccctgagaaggagtctctgcctctgccttatttgcttgctttgccccctccgtctccgcctgatacccttcgcacgcttccgctcgcttgactcgtactcgcatcgccctcccgaatctgcttggcgctcgcttcttgatcctcttgcttgcttcctgccctgctccgccctactgcacgttgtactgctgcctcatgctgccggctccgtttgcttctattcgcatgacctgcttttcgccatggatcatcgtccgagtcgccctcccgacgatggatgggctaatagccctgctgctgccactgctgttgcggctcgtagccctgcaacgtcggcggaggcggtgctggccgggcgagtcgctgcttccacgctgagcgaatcttcggcacgtacgcaaacagctgcggttagatagtcgattgtcagcggacttgcgagaacgtacggcgacccaaaaaggtggggtcgacgaccgacctcgtcctcctcgacgccatccttgatcgactcgaggatctttgcgacgatcgtcttgtggttgccgtggtgcttgtcgtcccggatgcgcatcagccggaacgtttggtgagccatgtcccacgtcacttcgacaatcgcgtcgtcgtactggagcttgctggccttcatcctgctcaggttgcgtcaagttcgagttcgtcagcgcttgactagggaggggacctttagacgaagaggtaagccgggcgcactgctcccactcgtcctcctcgacgatcatcgcgtcaaaaaactcgtagttctcaccgcccgcccactggagcaggtgaaagacgggcagggccgcaaagtcgggctcggccgagccgtcgagggcggggaactggagctcgagcttgaagtcgattgagttctccgacggcggcttccatttgaggctgccggaggtgcaaagggggggaagaggcggagggacatgggtccgtcagtcgttagagcggctcacgcctcgagcaggtgagcaataagacgcacatcatctcgtccgtgcccgtcacatagccgctcccgcagcacgtgaaaatgagcccgtcatggccgtgcatgagcttcgggatatcctgccggacgaccttttcgacgccgtatgcgagctccatcggcttgaggacgacctggaagggcggccgcggcggcggcggcgcgcctggctgaggctggaggggcgagagatcgcgatggggccggatgacccagttcttcaggcgctgtgaggggcaagagggtcagaggatatgcgagagggggatcaggagcagttcagccagtctgtatcggcctggggcaaggccgaggggtgtgaaggggtacgcgtcgccgagagaaaggggaccgcacgccgtaccgcgacatcaacggcttctggaacaggttctcgccgttgaagacgatgcagtcgaaggcatacagccggagcatctcctgccgacgggcgttcaaggacgcaaggggcttgtcagccaacccctgcttctttgtttggcctgcaacgccagacacgtcgcaagaagcgaatagagacccacccggcccgtgtccggatcgacatcgacaacgagctcgccatcaagtagcgtctcgccgagcggctcgcctcgaatccgcttcgggtcgctgcctatcggcgtcccgttcggaaagcgaaggccctcaacctggcggtagtcttctttgcggtcgatcttggagcgcacgagcgagagctgcatcgtcagcacgctttcagactggcaaggattgaggaatgaggaatgagagggggccgcacaagaaagacgtcttgctgattcgtgatgccgttgaacgcgatgaggacgagcacccgaacgccgtcagacttctcgcagacccagaagctgaagacaacaagaggtacgacagaggacgtcagtaagctttggcgggccgacggcgtgagagcgatgagggactgactcttgcgactcgagcagggcgagcgacttctgcgtgaagctgactggctggctgccgggaaacctggttgcggcggtacgtccgtgcttgagtagatcagccttcctagatctgggacggataaggccggtagctgcccttcccggaagaggatggagggcagagggcagaggacaatggaggacgcaccgcggcgtgccttcgagctggcacaggcgggcgacgaggtcgcggaggaagtcgctgatgggcggccggatgagcgtgcccgctaagagaagcagcagacgtagcagaagcatgagcgacaaaaaatggggtggctgggaggcgggacagacggatgctcgggatccgggtcgtcgctggcataacggctgctcctggtggaactggcgaggcggccagattaacgagcgagagccgtcgtgcacgagtacgacgagtgcaggcggtgaccctcggctcgagcgaacaggggtcggcgagcgcttcctctcggccagacgagctcgggagcgtaggtcgctggagagcgagctcgaaggaggcgacgcgtcaaagggggtgcaacgggagaaggcggcgccgagcgacgagcttcgttgaggtcgggtcgcgagagagtcaggtcccttgttggatctgccgtacgctgcgcgagctctaggacgtacgtcgagagggtataggcttgaggcggctgttgctggtacgtcgaggtggaggtcggaccggtgcctgctccttcgccggcaacgtcgaccatctactagccagccaaatccattatggtcagcctcaacctcaacgaggacaccgagttgtctgtccctctgcccttctgttcgtccctcgcacgcggctctggcccttgcagctgaccttcttcatgcagccgcgacgccctcatcgctcagggcatcatcgacgcgcccgtcacgacgcctccaacgcccgagcacgagctcccatccgacgccgacctgctccaggcgaccctctcgctcgctgatgcccagacactccgaacgctcgccgacgagacgaccgatgatgccgaggctgccctctttgcatcgtaccgcgcaaaacggatggccgagctccaggcgaccgagcgcagggcgcgcttcgggaggctctatccgatcagcaggggtgactggtcaaaggagatcaccgaggggagccgggtgcccgagcccgggtcagaggaggagagcgcggtcgcagagtcaggcaatgacgcagaggtcgagggcggcaagaagggcaccggcgtcgtcgtcctcctctacaaggatgggtccgtcgaccttcctttctaaaaggaagagagcgactcttctcgctgacccctactttttctcccccgaatcgcagccagccagcctcgcagcacctcaagtctgctctctcgcagctcgcgccctcgttcccgcagacaaagttcgtctcaatcccgggcgcctcggccatcgagaactacccagaccagcaccagccgacgctcatcgtctaccgaatgggcaacgtcatgggtcaggtcgtcggcggcgacggcgttctcggaaagggcaacgcgaggggtacgtccgcccgacctcttctctcgaccgcgactctcatcacgaacgcgcgcgcagaagattgacttgagcaccaacccccttctcgtccgtcgcttccccttccctgcgctcgcgcatatgcagacatccagaccctcctcctctcgctccatgccatcctcccccatcacctgccgcaagcgtcggccctccagtccgcagccgcgccgagccggcaagagtcggacgacgatggcgacgacacggacgacggccggcggggctgcggactggagggccgacgcttgcggcaggtgatgggggaggatggcatggagcgagaggaggagggtctggagtatcggggcgggaggggaggttcctttgagagaggggcggtgaggagtgagaagctgtgagaggaccaggaaaagcaaaggcatagacgggagagagaagaggatcatggtggaggctgcctcagatgaggttcatgcacgaagggcagacaaagaccgtcttgccgtccgggccgcccatctcggagccgctggcgtccgagaggagcttctggcgggcggtctgggccttccaagtgtcgtgcgcgccctgagcaatgttgcggagggcggcaatgtcctttgcctccttgccctcggcctcgagcgcctcgacgtcaatctcgacctcgggctcctcgcccgcctcgaagaggaggacctgctcggaccagtcctcgggcagcgtctcgccccgggcgcagacgtcgcgcataatgcgccgggcggcgagcgtcgcctgggcggtgccgacgatgccggcgtggactgagccgcgggtgatgggcgcccgggcgagcgtgaggatcgccggcgggagctcctcgaccttggccgggtcgtagatggcctccttggcctccttctcaggcttgccggcggcggcgccgtcgttcgtcttggttttcttagcggccgacgagtcgccctcgtcgtcagagtgctcgcgcttaccgtcctcgttgaccgacgtcggcttctcgtcgaggaggtcgtcggcctgcggcgtgtcctcctcctcgccggtgttgcgctcaaagtcgacggcgtcggccgaggtccggtctcgcgagccggtggtaaggtcaaagacgtggtacctgagggagagtcgtttcgggtcagcagcgctctcccatacgagtgagcacgcaaaggacccgacgcaccaggtcttgcacgccgccttggggcagtagtgcatccgggtctcggagctgagcgggatgggctcgtaggcctgacccgaggtcgacgacgggggctggatcggctcggggagggtgagcctggcgtccgggcccgagggcgcgcgcgtgtatttgtcgccgtccttcttggcgccggcacagaggttgatcgtcttgtagctagtcaggccaatgagagaaggtcagcatccgggcaaagataggaggccggatgagggttagacgaaccggacaaagtagtcgtcggccgcgatctggacctggttctcgtcgcactcgtcatactcatagacgacggccttgtctgcagcgacaaaaagaagcgttcttcagctgcctgtcctctctgaagcagacctggtggaaggagcacgcaccatcgcaggtcgagacggggatgatctcggtgtggtcggtgtggacgagctcgccgccttggaggttgaggtgcttcatgtgcttgtagccgatcgaccggagctggtcggccgagtagtaccacgagatcttgctgtgagagcggcgaggaggattgagagaagccattgtcagcgaggtgacgcggcgttgatcggaaggggacgcgccgccccaagcggaaaaagcctcgccgccgacgcgcgcgccaggacgacgcggcctagggaaaggaacgcacaggtagacgtcgaccttgttaagcgcgcggatctgctcgatccgggcgagccagcgctccgacgtgtgcgcggcctgaacctcgctcttgcgacctctcttgcccttaccggccttgcccttggcggcggcatggacctcctcctcggacgccgtcacgcccgggttgacgtagatgcggtcgccgacctggagcttcgtcttctcggtgtcgggaactgatttgggacagcagcgtcagcaacgtaagggctggatggagcgtcaggaggcgcggatggctctcgcacgacgcgtcgggaaaacgcacgctggcaggcacggtaggtcttgactaaagaaagcatgaggtgatggcgcgcatccagtcagtcagcggcagcatgtggcggcaagaacgaagcaattatggacgcacactcgatccaagcatcagcctcagggatcttgcctgcgagagcaaaggatcgcagggtcagcccggtgcgtcattaaaggggagagaggcaagggtggcgggcagcgagagctcgcgcccgccgccagtggggcaggaacggaccgatgtcaagcttggcgcggtcgatatcgagctccttgccggtggacttgcgcttagacttggcgggcgagacggtcatcgtgtgtgtgtgtatgggtgaggttaaggggattggatggcgcgcgaagaagcggaggcggtgagggttagcggggcagcggcggccggcagagacgacgcgacaaagacgcgcctcgcgcgacggcgcggccagccaggtttcaagctccgccgcgcgcgcgcgttggccggcccctttcgcgaccgagagcctgtcggccaaacggccattcagccctgcccgatcaaccatctctcatcagctcaagcatgcccacctacgacgtcgctatccttggcgcaggcttctctggcctcgtttgcgcccaccagctcgcagcaaagggcttctccgtcctcgtcgtcgaggttcgcccggtctagctactttcagtcggccggcccgataagccgaagcgctgcgtgcgtgctgacctttggctctcttcgctctgcagggcaggaaccggacgggcggccgcgctcgctcgtacatcgacggaggccatgcaccggtcgacctcggctgcagttggatccacggcttcgagcagggtacgcctgtccgcgcactcgtcgaggggctcggcatcgtgcgtcgctcgtcctttcgtccccgcatcgtgccggcctgtcatgaagcgccgctaactcgcacgaccacgctcacttctacctctaggaaactcacgtccctaagccgaccgactcgctcgtccttggcccgaatggtacgtcgagcgcacctgccagcagtcgcaaggccagccgaccggcgttaaccgacagcccggcgccgttgctgacccgtaccctcctacgcacgcggacgaccatccctcctcggcttgtcgaaccctcaatctcgttctctgagtaggcccactcgaccccgcgctcgtcaagaagctcagcgccaacctctcggccgcccagcgcgcgctcggcgacgaagcgcagtcgacctcgtccgccgacgcctcggtcgccgacgcgctctttgccggccggtcggccctctttgccggcttggaggaggatgagcggtcgctcgctgaggggctggcgaggacgatgcaggttggctttggcgtgccgctcgagagcgcctcgctcaagtggttcggctacgagggtgcgtcagccgctccccctctgtgacagcacacccgaaagcaagctgacttgccgtacacccacgccagacaactttgctggaaccgacgcagcgcccgagggcggctaccaggcagtgacggatgcgctcgcggccaaggctgaggctgacggggccgtcttccggctcggtgagaccatcaccggcgtctccgaggccgatggcggcgtcaccgtccagacgtcgtcgtccgacagcagcaagcagcggcagacgtacacagctcggacagccgtttgcacgatcccgctcggcgtcctcaagacgctcccatcgtccttcttctcgccggcgctcaagccgcgcaaaacccgggcggtcgagagcacgcacgtcggcgagctcgcaaaggtcgtcttgacttacccatccgtctggtggccggcaaagactgggtccttcaccgtccttccttcgagcagcccgctctcggccgccgaggccaagaaggcgagcgcggccgagttgctcgcgtcgatcccgctcgtcgtctcgtcctttgcctcgggagcactgccaaagacccacccgacgctcttgacctacgtcgcctcgccaatctcggctctgatcgaggcccttccctcggccgacgtcgccgccgccctccacgccaccctcgccttgaagatccccatcgccgccgctgccggcgctgactcgtcctccgcccctgagccctcgcacgccgttgtcaccacctggtcggccgaccccttcagccttggtgcaacttcaacgcccaacacgaccggcccgcaccgctcgccgctcgactttctcgagctcagccgggcagagtgggccggcaggctcggctttgctggcgagcacaccgacgtcaaccaccgcggctcggtcacgggcgcttgcgtcagtggcgagcgcgaggcgacgcgcgtcgcgggtctgctcgagcggctcaaggtccgtgaagcgtcgacttgagcggaagccagttgagatctcgcgttcgttgtagacagatgaatgattcgagggtggctgtgctttgcgccccgtcgtccctctacgttcgtcttaagaaggcgaagctaagatcgtccgcgcatcgaagtttagcataggggtacgcgcggatgacacagaaggtgaaggttcattcatgatgcgcgcgcgcgaacagacagagagcgacgagttgcgaggcaaggtgcgagtgcaagggcagaggtgagcagcagtcgttacttggtctggttggcctgagggcggaagaggatggcaactcgtcagcttatgcgcgtggcagactgtcggtcgcagcaggaagtacgtacaagcatggccagcaggctggcgatgccatccgcagggggagcggcagttgcggcttgcgcaatcctcgggtcagcgacagccgccgctctcgggtcggcagatctgccagacgcgccgaccgggctgtagcctcctgtcgggtactggggcgagccagccgagccgggcaccgggtaaggtgctgatggctggtacggcggttgctgttgccgaggcggaggagcgcccgggtaggcgccgccgccgtatggctgaggaggcggagcgccgtaggcaggctgagccggaggcgcgttgtaaggcacggtgtacggggcggcggcagccggagggccgccgtacggaggctggctccggtaagtgtcggccgccggcggggctgcagacggcgaggcgccacctccaggcttgaggccctggagcagctcctggactcgccgggccgcctcgaggcggtcgtcgccgggctgaaggagggagggggtaggtcagccagcagcactcaatcaggaacttgaacaagcggcagagagacgtacaggagggggtccattcctcggagtagggccacccagcggctgagcaggacctccgtacgacgagggcggaggaccagcgccgtagggaacctgtgagggaggagggccgccgtatccaccaggccggccgtctgcgagagcgattgagaaagcaagatcagcaagagaaggaagcagcatgaaagctcaaaggtcgacgcacctcgcccgccatcataggagccagcagagtggccgctcggcggagggccgccgtagggaggtccatcatgcggcggagggccgccatacggcgggccgctcggtccacgatactcgtcgcgcccgcggtactcgccgccacctcctggcggtccgtagtcgcgctcccgcccgcggccgccgtatgatacgccgcctcgggggtcgtcgtaagctcctcggcgctctgggctgcggctccgagctcggggagggtagcctccgccgccgggcgggccacttgagccgggaccgggagggccacggaagccgccgccgccgcggtcgtcatagccccctccgccgcccggagggccaccataacctccgccgccgggcgggccaccgtaagctcctccaggagggccgccgtaccctcctccgcctccaggagggccattgaagccaccgccgaagcctccccgaccggcaaagccgccgccgcgtcctccgtcgtcgaagccgccacggtagccgccgcggaagtcgccacggccgccacgaatgccgatgcgccgacggacggaaaggtcgcgaccgctgcagtcaggtagcgaggggtgatcagctgctgctgatgatgacgatgaaggcttgataaagggccagggactgacctgccctccggcagcggaacggccgggacgtcccactcgtacgagagccgcatcttgccgccctgcagctcggcaccgttcagcgtctcaaacgccttttgagcggcctagaaggagagcacagtcatctggggtcagcgggaagatcagcaggggtcgctcaacaggacgacgcacccggttgtcgtagaactcgacgagcttgtgcctgcagattcggcaaagggagcagtcagtagctgcgcgcagacatgcagcgccaacgcaaaggacgcacccggggctgttcgggtggtcattgacaatcttgatctgcccggcagggccgaggaccttctggagctcggcgtcgtcgattgccttgccctcgccggcgccctcgagaacgacacggatcgaaccctgcacagcaaacgcggatcgacagagcgactcgacgtcagtcgcaatctcaaagaaacgtagaccagactgcggcgcacctggttcttctcagggtcgcacgccttgttgaggtcgatgtctcgcggcagcgaatagtggacgtcgatctgtggcgacaagagcgccgtcagcgggagcaggcagtcgaacaacgggcagacaaggctgctcacaggccgaccctggacggccatgccctggaggttggtctttgcctgctcggcagcacggatgtcaaactgtcgaggtttgcgcaggcgaagaagtgtcagacgctgggctcgcggtcgacacgtatgcgctgagggctcacaaagttgacaaagatcatgccccgggtgccgatgagatcaaagaacgacttgatgtcgccaaagtcgcggaagcggtcctcgatctctttcgtctgggcgtcgtactgacaggaaggggggagagggcacgcctcgcgcgggcttcagatgactggccgacaagtgactttgcccgtgcacgctcactcgctcgcttgcgacggagcggctaggcaaggcaggtggccagaggatggccatgcgatcagactcacggcaatgttgcggatgaagagcgtccggcacgggcgttcgcgcttgacgcgctcctggatgagcgacgcatgctcgttgtcgtcctcagagacaagaaccggtcgccggcccatccggttgccgttgatcatgccgcctgaacgtttgcgagacgagacggatcaaaaggcgcgagtgagtggacttgcgctcgcagcgagacgggggagagagacctcagcagctgaagggggaagcacctctgtcgggaccgccgtcgaagccgcctcgcatgccgccgccaaaaccaggaccaccgccgccgccgccaggaaaaccaccaccgccacctggcgggccaccaggctggtaggcaccaccgccatagggtgctgacggaccgccagggggtgccggctgtccgtagccgggctcgcccccgccaggcggaggagggcctccgtaaggctgctgatgggtctggtacggcgactgatgggcgcccgggccaggcggaggaggacctccatagccgccaccgccaccaccacctcctggcgggccgtaagcaccaccatgctgttgagcgggcggaggagggccgccgtagccgccgccgccgccaccaggcggggcgtacgggctgcctgccgggggcgggccgccgtagtgacctgacatggctctcgcttgcttgctgtggggactttccgaatgtctctcgtctgacgagcgcgtgtgcgtgtgtgagaggttctcttgagcaagaggagcgggtcgatggtctggtgagctgagctgcctcgttggcccctctgcccgtctctcacggcgggcgttttcaacctccggcttcgcctgcgcctcgcctcgccgacctccctgccggcagccagcgacccccttacagcccttccccttagcctctagcccagctcccgtccggccacctaccagctccatacggtcgccatgcctcgcctgtcggtctcgctgaacgcctcgctgaggtcacttcggttgtcgtccccggcggcgtcgtcggcgtcggcccgccggctgccttcgcgccaaccgtactcgagctcgcccgacgacacgaccgctgtgccggaggttcaggtcaaagccagcgaggaagtcgaggaagcagaaatcaagcctttctcggcaccgttccacctgccgcaccaggtgcgtgtctgcctcgcaagctgttgagccagggcttagatcgagcgctgactccccgagctcgaccgccggctctatgctggtccctttctcacgttgcagtacgcgcgcgtccagacgcccaacataatcccgggcaaggtcccgcgaacgacgcttgacacctcggtcccgaaagagggtgtcttcacggccgagaacgcccacctgtcgagccgaccgctcgacgtccggcagcgcgaggcgtaccagatcgacctgctcaagccgggagagcagctgccggtcctttcgccgaagcagctctaccggtggtgggaggctcgggcggcgggcgagctgccgacagacccccagacggcggaggaggtccgcgagagccagcaggactgggcggccgactggaacgccgcgcgccgggccaaggtccgcggtgtacgttgaccctcatctcactgctgcatgctttgcggacagcgagcgtacgctgacgtctcgctacctgtccgcttcacaggtcgacgaggagggcaagattgttggccagcggatctacctgcccaacattgtcttccgcctcattccgaacgcaacgcactttatccggccaaagcaggaccgcaaggccaacctgcacgccaaccagcgcaacaagccgctcgcgatggagcagtacaacccgtttattgcgacgttccgcgtgccggccgcgctcaacaagattgacatcaagggctacctcaaggccgtctataacctcgacacgacgtttgtccacacggccatccagcataagacgcgctatcaggtcggcggccggggcgagtggaagaacggcaagtcaaaggacaactacaagcgggccgtcgttggcctgaccaagcccttctactacccgaacgacccgctcggcatggcgcccgaggcccggaccgcgtacgaggagcggctcaacaccgaattcagcacgaacgactaccgcgatgctgaggttgcgatgcgccggcgccagtacgccaacgtccgcaacaacctcggccgcagcgagcggtcggccaagatctacgcgacgacgcccgagggatcgctcaagtgcgtctggcgccgctcactcgctccatcggacctagatcgcgcagctgacctcccactttgccgaccgttcgcaggcgttcgaagccggcgcggctcgcagagaaggaccgcgtgcgccaggagctggccgccgccgtcctggccgagcgcaaggctgcgggcgaggcgtcccaggagacattgtccgagggcgaggttgtccttccggaggacgaggactggcgcagcaggcgctagatcagatgcgactctcagcagcgacgagggtagatgggaagagggtgcaggtttggggtgccgggccgtccaacagccaggagaatcagacgcaccgcagcgttcgctggaacatttcttgacatcagagaaggcagccaactcgtagccttctacacccatcggttgaacgttcctttcctgctcgcccgcgtgcattacgagtcgtcgtcgtcgcccgcgcgggaaccctcccgcccagaatccgctggactctggctcgcgggcgggcgggcgcgccagagtccagcggaaggctagtaggagcgcgggcctggcgccggctcgcgatcccagtacttgacgtactcgggcccgagctgatcgaggctcgagacgccgaggttgcgcatcgttgtcgcaatctcctcgttcatgactgcccaagcgagcgagtcagtctcgaccggtcatgatgcaccgagcctgcgagacactcactctggatgaccttctcggccccatcctgaccgtaggttgcgttgccgtaaaggaacgacctgccgaggccgaccgccttggctccgaggcagagggctgcaacacagaacaagcggggtcagcgtcggtcttgaattgatggaccgacagcagagggaactgacccttgacgacgtcagtacctcgccggacgccgccgtcgatccagacctcgacctgcgagagcaactccggcttcgtctgctgcagctcgtagaggacgtcgatcggcggcggcgaaaagtcgagcgaccggccgccgtggttcgagaggatgaccgcctcggcgccgtacttgacggcgagctcgacgtctgcgaccgtctggaggcccttgacgatgatcgggagtttcgtcaggcttttgagccaggtgacgtcgtcccacgagaggtcggggtcctggtatccgctgatcgcctgcgccacgccctgcgtcgccaccttgactgtgcccggtgcctgcctgacgactggcttggcccgcttgtcaagctctcggttgccggtcgcggcagagtcgactgtgaacatgatggcggcaaagcccatctgctcgaccttcttgacgagcgcctccgagttctggcagggcaagccggggcagtcagcaagagggcctttgacggacgagcctgtgcacacccgactcaccgcccggttccggtcgaggtagatctggaagatccagtcgcgatcggcctcggtccggacttcggccatctcctcgagcgagcacgaggcgttgatgctaacgccctgcatgatgccgcccgtcgacgccgcccggacgagattgagctcgccttccgggtgaccgagcttagccatcgcctttgggaaggaagtccgaggtcagctctaggcataagggatggcacaacaagcatcagagagcgcaggacgcactgccggcgagatgtagattggcaaggccgtcttgatgcgaccgccgagaatcgtcgactccatcgagatggtcccaacaggcctaagcgtacgcggtcggaaaaagtagcgcttgtaagcgtaggcattctcgcgcttcgaaaactcgtcgtcgccggcgctctggcggggacggtggcatcgtaaaacaagggtcagcccgggtcttaccttcaacggtcggctcatcgacactcacctcatagtaggcccatgccgtcttggcgagaacatccttcgcgaccttctcaaagtcctcgaggttgtacatcgcctcaattggaggcatgtcgcgccgggcctgctgcactcggagctcatcgtccgacggcccgtcgtcgggcaggtcgccgcgggttgccgggtcgaggatccccatcagcttggacgggccgagcgtccgctcgatgatgcccttggggtggacaggcgcgaagattttgctgaggcaaaggggaagaggcgtcaagagtcagcgtccctcgactgcgcacgagcgagagcagctggaactaccgacgtcgcatcgcgcccgctgttgttgacgatgacctctgcgccgcccgggtggagctcgaggaactcagtcacgtcccagaccttgtcatttatgatgacccagcaatcgtcctcggctgtgtgagcgaggacctcctttgcagggatcaggcgcagtgggtcggtcaggcccggcttgcgcaccggtggcggtggaagggcgtcgagctcgatccgctgggtgagtgagaggcacacgcccgccgagaggagcgcgagggccgagagggcgacgatgcggcccttgctgccggccgacgaggacgagggcaagctgctgtacgcccgatggggcggcccaagtcgtcgcgtcgccggcgaggacgaggcgaccgggcgacaggcagcgcgtgcgcaggcagcaccgatgcgggcagcgggcccgttcagcttgagaggggtcatctgtacgaggtggtggtgagcagggagcgagcgatccgctcgaacgacagggttctcgtcggagggaccggctcgcgagccggacgaaggcgagctgaaccgagaagcgcccttactccccgaacgtcgaccccctttcatcgcatcctcctcccgctcagcatgtccaagtctgccaccgagatcgaggacgaggtcctgccgctctcgtcggccctcgcatttgacccccagtcgtacgtcctcgtgctcagaaggggccggtggcagctgccatcctctgctggcgcctccgcccagctgcaacctccctgacggagttctctccctccccgaccggtccctccagactctcgatctacgccgtcctgctcgtgctcgtcggcctcgccggtaattgggtctacaagcgcttcttctacaagcggccgctctccaagggcgtgcgtcccggctgttctcagcgccgtccctctccgcgcgagcgctgctgaccgacctccttttcccgcccttcgcagctcggcaagaatgcgccaggcttcctaacggccgttggcaaggcctacgtcgagaacccgaacccaggccggcagctcgtcgaggtcgatcaccgacacctctaccaggccgactcggtcccagccccgcagcagtttgaccagccgccgaccgacgccgagcgcaagcgggcggacgaccaggccaagtgggaggccaacgagtggctcccccagggccacgtcaagaagcgaccggcggcgggcgacaagaagagcggaaagggccgcaagtgacggggatgctctcaacaatctagatgggcttatcgctttctcttcgcaagagtcccgctgctgagggcgttcgtaaggagtccactgctgatggtttcatggatggatcagagagggccctcccgagggggtttacaaggggctctagagtatgaggaggccttttttcggaagcgagaggtcacaacaggaattcggggaagaatgcgagcgctctactccttcttgggaccgtcgtaggccgactcgtggatcttgacggcccggcccgaggggtcggccgacatgccccagtcggcgcgcgggatccagcggacggtcgtccgagcggcggcgtcggtcgggaagtggcgctcaaagacctcgcggatccagtaggcctccttagtcaggggcgtgtcgactggccagcgctcggccgccttagcaaacgtcgcgtccgagatggacgtctcggcgtgatccttcatgccgtcgatccacgagtagccgacgccgtccgagaactgctccttctgccgccagagaatctccttgggcaggtagggcttgccgtcgggcgcgcagtcgaacgccttgcggatgatgtactgcggaggggagcgggacgagcgtcagttgggcacttaagcgggaagccgcgcttcgaatgtaccttctccatcttggggcagccgtcggcgtcgacctcctggtgggcgcccttgctgaactccttgtgcttggcgtcaacgttcatcgcgacctcgaggaacttcttgtcgaggaagggcacgcgggcctcgaggccccaggccatcgtcgacttgttggcgcgcaggcagtcggccgtgtggaggttcttgacccgcttgacgagctcctggtgaaacgatttggcgtccggggcggcgtggaagtagaggtagcctggatggatgcacgagtcagcgtccggctgttcgagggacaattaatgcaagccaggacggaccgccaaagatctcgtccgagccctcgcccgagaggaccatcttgacgcccatggccttgatcttgcggctgaggaggtacatcggcgtcgacgcccggacggtcgtcacgtcgtacgtctcgagatggtagatgacgtcctcgatcgcgtcgaggccctcctggacggtaaacgtgtactcgtggtggatcgtcccgaggaattgggccgccttgcgtgcggcgaccaggtcgggcgactcaggcaggccgaccgagaacgagtgcagctggggccaggtggcgagcgaggctgcaaggaggcaagctaggtcagcctaagggcctcgcctcaagcagactgcgcgaagggcgagcgacgcaccgtcctcgtcgacggctccggtgcccgaggggccagcggcggcgtcgcgggccttcttctgggcgagcgcaaccttctcggtctcacggacggcaatggcggcgatcagggacgagtcgaggccgcccgaaaggaggacgccgtacgggacctcggacatcaggcgcttcttgacggccatctcgagcgtctcgcggagctcagtcaggtcgacgtcgccgtgcgggatgtcgtccttgtcgccctcccaccatgacggctggaagtagcgcgtcgtctcgtccgtcgcagagtcgtagacgtggccgggcgggaaggcaatcaagttgtcacactcctcgtggagcgccttgagctccgaggcaaagtacttgaccgagggtgccgacgacgaccagcccatgtagagcgtcgtgatgccgatcgggtcgcgggcggcgatgacccgcgagggcgtgaccgacgagtcgagcaggacaaacgagaacatgccgtcgagcttgcggcagagctcctcgggcgagtgctcgcggtactgtgagcgggtcgagaccgacgggcattgtcagcaagcgggaagcacgatgccagaggggcacagaggtctcgaggacgaacaaggtgcatgatgacctcgcagtcagagtgcgtcttgaagacggcgtcctggttcttgagatccttgcggagggcgaggtggttgtagatctcgccgttgacgcagagcgcgaggctctcgtcctcgctcaggaggggctgggcaccggtgtctaggaggcaggaggacgggggacggcgggcgcggttagagcttgctcggccgaaaacagccgcctagtggactgaccgacaccgacgatggcaagccgctcatggcagaggatagcgttcttcgtctggtagcaaccactccagtcgggtccgcgatgcctcagcttcttggagagggcgacagcccgagcacggaaggaggggtcgagggaggcctcctggctggcgccagaggcgtccggctgctgccgatcaaaaacgcagaaaatgccacacactgtgggcgggcaagaacgttagcgtttagtgtgaggatccagctgtcctcgcggacgtactcgttcagtgtgaggatagaaggccaagggtggaaaaggatcagggagcggaggtgaaggtagtcgtcgaggttggaggtgagcgagccaagactccgagcttgactcggacgcgggcgggcgaaaacggtcagaaccccgattcgggctaagctgggctttgccccaggcgtgtccccgcagcgcgtccctatcgccctctctctctcactctcaccccccatcgactctcctcgacgatgacctaccacgacccttataacggcgccaacaacaggcagagtgcgttcttcgacacgccgtcagcttgccagcattctatccgcgaggcagcctcgggcactgttctcttggccagccagctgatgcttccttctcaacggtccgccgcctctgcgaaggctacgctcagtacaacgatgaccggcccttcgacacgtacggcggcggcggtcaaggctacgccgagtacgacgacaagctccctccggcaccgccgtgcgtccgaccagccccggagctagagctgcggttccttgcgtcactcgagagccgaagggctgaccgccgcgagtgctgcgatggcctccctctctcttttcgcagacgcaacacgggcatgctcggcaagtggcgcaagcaggacagaggcaaggtgctgatgcgggtgcgtttctctcccttcctctggccgtaggccgctcggacgaacgagcgtcgcctgctgccggctgcccttctcgggcgacggtcaccgacgcgggacgactgcgcgcaggctgtgagctaacaccccctcccctcctcttcgcgaccccccaaatcgcgaccccccaaagggcggcggcctccgcttcttcggccggtgttgtgcctgcacgaccatgttcacgctcgtcctcctgctcggcatcgtctttacgctcgccctcttcatcaaagtgagtttcgtgcgagcggcccctgccctgccctgccctgtactgcgcgtcgggcatcgtctgacagcccgtcgtcacccttgcgttccacctcggcagccgccgaacctgacagtcaaccggttcgaggtcggcgacgcgggattcaacgggactgcgctcgcagcgaatctcaacctcgtgcgtctccgtcttgttgagcctctccgcgcctctgtctgaccctctcctgctcgtctgccccgtctggcccgcgcagtctgtgacgtgtgtcgcttgatcctcctgcatctcaggccgtcgctgatctgtccttcgccgcctgcctcatagcatcacgaacccgtcctacttctccatcggcctgcgcaacgttgaggccaaggcctactggccgggcgtagcgaccgagcgtgcgttcagaagtctcagctgcttcgatcaggcctgcgtgctcaacttgacgccccccttaccttctcagtcggctcgtcgcgcatcgaggacatcgagtgagactgccgccctcctttcctggagttgaacggcgccgctgatcctctccttcccttcttgcagcttcgggagcaactcgaagacgaccttcccggtgccgatcagattcagctacacgccctcgccctctacggccaacatcctgtccgacgtgagctctaccccgccggacgtctcggtcatgtacgaccggctgacccttgccctcgtcacagatcgtcgaaaagtgcgggctcgtgtcctcgtccgcggcaggcgatctgacggtcgactacaagatcaacctcggcgtccggatcctcggcgtgcgttacctccctccccgcgcctctctcattggccctctgctgacctccatgcctcacgcagatcaccgtccgaccaaagattgcaaagtcggcctcgttcgaatgtccgttcgatggcgacacgctcaaaaaggtcgcagactccgtccttggctcgtccggcggcggctcgacgcttggctcgaccgtcgcgggcatcctcggctccatcacgggctcgttgtaggggcggcgcgcgggcgtgccgacctatccccctcttgtctgccggaggtcgcgggatctcttgtgcgcagcgccagccgcgttgtactttttcgtttccagctctttcctctcgatcatggaccttctctgtccgccagccttagctagtctcggcgccggtcgaaaacagaagcctcgtatcaatttgcaggaccggcgccggcgggcgagcctccccgccagccggcgagcggcgccggctcgcggtcgacaaagcgcaccatctcgggcgtcagctcgtcgatcgacgtcacgccgaggaggcgcatcgaggttgccatctcctccttcatcactgccgaagtaacgtgggaaaaccatgggaggggaggcgtcagaatatgcgaagggcgagattggagcgagtggggcgttgacgcacgggtgatgaccttttcggcgcccacctggccgtgcgtcgcgttggcatagaggaacggccggccgaggcccaccgcttttgcaccgaggcagagtgctgatgaccgggacgttgattcgtgtcagttgatggcgcgcgagagagtgtgcaagggctgttgacgcacccttcaggacgtcgctcccccgccgaatcccgccgtcgacccagacttcgatctcggaaaacagctcgggccgcgtctggcggagctcgtagagaacgtcgatcggcggcggagagctagaggagaggcaggtcgagtcagcggtcggcaagggcagcgcttgatgaaatgtaaagcttcgctcacaagtccagcgctgtcgtcggccaaagcgggaggtcagctcgagaaaccaggggacatcaggaacgcggtcgcgcactcacagcgtccgccatggttcgataggacgacggccgtcgcgccgtgctctgctgcgagcgcgacgtccgcaacgtcctggacgcccttgacgatgatcgggaggtccgtgatgctcttgagccatctgacgtcgtcccttcatcagagcacaagcgtgtcagcggcaagtgcccaagggcagggcgagagggctagagacgccggccgcaccaggtcatgtttgggtcggccgcccggttgtcgacgcgcaggatgtcggtcggcggcacggccccgacgccaaactggcgcacgtcgcagtgtggtcagtcagcaacgacctgtgtacgacggttcagagtagcgaaaggggtctcacaccgctgtctgcgagcttggcccgcttgtcgagctcgcggttgccgaggacggccaggtcggccgtgaagatgatgccgctcgcgcccatgtcttcgacctgcttgatcagccgctccgagacctgcagagaagacggaaagtgagtgacctgacagagctggcccggggggaggcgactggcgcacctttcggtcccgattcaggtaaacctggaagagccaaggggccttctcgcccgactcgtcgcgcgcctcgcgcatctcctcgagcgagcaggatgcgacgcagctgatctgcaagacacgaggaaaagggagaagggaatcagcaaggcgcctcaagaccggagtgtcagcatttgactcacgccatggacgacgccgcctgcgctggccgctcggacaaagttgcgctcgccctctgggtggcccatccgggcgcgggcctgcaagggagagtcagcgagagccgttcttctcgagcagcaacgctcgactggggacctaccgccggcgagatgtagaccgggacgctcgactggatgcggccggcgaggagcgtcgtgtcgagtgagatggcctccaccggccggaggatgcgcggccggaagaagtagcgcttgtaggcgtaggcgttctcgcgctgggctggaaggggacacgagagggaggcaggtcaggtcgtcttgcagtcagcgtgcgatagttggcccggcccggcccgacgaactgtagccgtcgtctcctgcgcaggcatagtagccccaagcggcccgactgagcgactcgtgcgcagcccgctcaaagtcgtcgaggttgagtatcgcctcgagcggcgggagccttgcacgcgcatcggcaacacgcccctcgtcggctgatgtctggcccgcgggagcggcgaactcgtgaatggacgccgggtcgagaatgccgacgaggctcgagggagccagcgttcgctcaatcacacctttcggatggagcggggcaaacaccttcctgttggggttcaagagcgcttgagacgtcagtcctcaaacgagcactgatttcgttacaagccaggggacaaacgtcgcgtccttcccagcaccctgtgtcaggatcgcgttcgccccgccgggatgctccgcgaggaaggcagtgacgtcccagacgcgaagctcgcccgagccctcgtccgaagcggtccaagtacctcggtcgcaccgccacccctttcttccctctcgttctctctaccgccggcaccctctcccccgcctctgtccccctcttcgaccactggcgcgccctcatgccgtcgtacggtctcttctcccgcctcctctccctctcacttctccgggcgcgtgctcgctttttcgccttctaagttgcgctcccttcctctgcttccgtctcctcccctcgtctaactctcaaactcctcgcctcccgtccatagacccgcctttgtcattgcatgcccgttacacccctaaccctaaaagatatagcagtggagcgccgggacgagctaaatattggtcaagacgattagatttcgcctgccggccgtctcggtcaagccgagcgcgagcggaagagggtcgtcgaggagcagctgtcgcgaggacggggtccttgtgcgcggcgtgcgacgttatcatgagcgagctcgtagctacggtggcagctagaactgaggacggcggctggtagaatatgagagtcatcccattgaacgccttgacggcagcagccgttcctttcttccccgtcccggctcccctatccctctacccgcacctggcacgtaagcaggtccgctctgggcagtcgaccatcgtgtggccaaccttgcatcagagctaccatgcgtagacgccgaacgagggttcctgcgcgccatgacacctgacctggcagcggcggcagacgatggaaatggctaggagcgataggtccgtggacgttgcggagccagaggaggacgactcgcggcggcgcatggtggcgatgagcatctttgtctcgttggttaccgttaggcagcgaacttcgtgagctggtgcataacctgctgccggaaggtttggtggagatcgtcgtcaggagacccttgaaaaagctgtgtgtctccaagatcgacactcggatgaccaggtcgacgttggcgccgatggtcctggcacgacgtcgagacggagggcgtcgatcctgtcgcagacaaaatctttcgaataggatgacagactcgtgcttctccgtcagcatgcaccatgcttcgtgcgtcgtgccgacaccagcgagcttgtcgccgtcctcgggacggagcttctcgcggatgagcgagagcaccgttcggtcgcccttaggagccgatcaggagaagtcaaccttggccctctagagggcgtggatgaccttggcagaccagcgaggccagtcgaaacgagagttgagagtcgcggtgaggagaagcagcgtattgaacttgtcgagctcgagtagggcgtgcatcgagaggcattgggagaggggtggcaacgagtcgaggccacggtgatcgttgcgtgaaaagtttgccatggcatgaagcgctctgggggcggacggcaaggagagtccggatgagtcgagaggtcgaggggagtgggcttgaacttcccgctccgcgcagcggcaacagcaaccgagatgggatgaagtaggggagccagagcgaggagggaagagggatggacaaaggagtctgctcagctgtcggaggcggtgggcgcgcgggccatcacggacgacgacggcgagccagaagacgatcggcgagcgtcgaatgaagctaaaggccggccgagcaggtggtcgagctagcagacccggggtggggaggtggacttcagttatgtccacagagagaccaatgccagctgatcgtctagttggtcgtccagttggtgattgtcttctcgtcatcgctggtctctctgctatctctgtcttgaggaaggttctgattggttcggtggatgcatcgacaacgaaaggaggtgggaagacgacagtcggcaatgcgttatgacgggttcgaattgaaacgcgcgctcagcttcgcccgcccgagccctctcgctctttctctcacactcacaatgctgctttcttctcctgttgctcgcggccgcagtcctccctagctccgtcaagaccgacgactataggatgtgcgacgaggcctcattctgccgccgtcccgctgcctgcccccccccccccccggcgtgatcaagtggcccatctcgaagctgattgatttatgttctcttgctcactcccaggcgtgctccggcgctctcaacatcgcactcagaggtcagtagcgagcgtccaggaccacaggctgctggacgcgtacggcgagtgccaagccgccttgacggacagctttggagcaagcgcccttggaccctacccccattgctgagcgcaggcactcagttgccggtacgacggcaggcgcaaccggtagatcggctgctcgccgcaccgagtctgcttttctcgtcgtccccacctttatcgataaagcccgttggttgagggatcggtaacggctttaccgggtcgagctgggagtttcaccacgtcaagtgcgctcagatgtcgaccgcgttgctcgtcgcccgcaacgtcgcgtgttttttggagcaggtcccgaaattgcacgtcggcggcgcgtcgtcgctcatctggagcttgcacgagtgggcagcccgatgccttcgtgtgtctgatgcagtctatcgcggtcgcatcgtcggcaaccaaagagccatcgccttccaattcgctttctccgtgcggcctccaggattcgtctcgttgcaaccgacctcggttgttcaggcccaacagtccggctaacggccaaataccaacgccaaacattcgactggaacagtagcccatccaccgccctcgatcacaacgctccatatgaggaggatccagacgcactcatcaccggaggtaccgtccgacgcaagtttcagacctgggccgttcgcctgtgccagaagctgggccgtgcccgagcaggcgttgttccggacaaagcagcagcgcagatgagatggaaaggcggctgccaccaggttttcacagcggatcgcatccggtattaatccgggcgtggtccgaccagcacatggaagatcatgagaagccctttgaaccgcttgataatgaatgtgagggttgacagcggccgaggagatttgtcgggcggaccgagggaagaccggctgaacttccgtctggcatacttgcatatacgcatgagagttgccggctataagggcgagccccatacagctgcttgcttctcgaccttgaacagctgcttaaattcgaggtctcaaggaaaatttcctctgattacggacctgaaggtcaaaagtagccaagaacgtcagagatcactgtacatcttgtcggacggataaaggaatagggaggtggtcccctcgtgcgtcggaattcaataagatcaaagctggcatgacgtcggtgtcacgatgggagatggttgctaagcgctgaagacgtggctgagggcgttgaacgggaggttacgctagcaatcttgcaatcccttcgtgcattttgtgactgaaaccgttggcagtcactctcatcctttcacagaagcgcgacggctttggcgtcacgcatgcccgccatcttacagacggccatctcatcaagggcgcggctaatgagaatcaaatgtgagcaccgggaagcgtcaattctcgcttagatcggcgaaatcgaccgcctctgggggcaattgaatcccttgaattattatttgacacaatcggctcggctagctactgctgtacgctcctgtatagagagagaaagaaagaaagaaaccgtgacatcggtgtggctctctattccagcggtagcgctagtcgttgggtttttgcttcctgtcaaacaaagctgtcgactttgacttgagcttacaccattccaaccttgcgttgactatagctgaagattattaccttttcccacgcagtcaattgtcacccgtccgctccgtgtcaaaatgcatatgaaactagagctagaagttcaatcgcagttcaacttcacatggaaggaccgcaatatgagcgccaacgtcttgtgcatgagacaggtctcgatcctatcacccgctgatagatgcagtcaattctggcgacctaaataaagcaaccgagcgcgagcgaatggaatctttgggccaataattgcctcagactgacgtatgtggcaaatgtccaggtcaatgaaacgaatcacagtgcactattttgccaatttcatgtgcgcaatgacaatgctcacaaaatacatgcctgtagcgtctttcttttgcaacgcctctgacaaaaagctcaaaagactaagaacatttgcaacataataatgagtatgaacaacctgctggttgactcagcagaacttagctttcaggggcgactttggatgtaattgaatcgagtcttttcacatcctcataaagacagagagtcagtcggtggtactgaaagcttactcggggtagccttgtttaattgtcttgattcaatcgtctttgcacccacgccgctttctgttcctttctcattcagcatcctgcaaatcacaaaccagctcgctctcgtttgcggatgatcaacgcaataatagctgcctcaaagcaagacacggacaatactccaatgtctcaaagtttctcaatcataatgtctccgctcgtactagtactttgctgcgaaaagaaaaccccgtttccgaggttaatgtagtcacactcagctgaaattcgaggcaagcattgcccgggtcaaggttgatgagctctatcaatatgcacactggccaaaagtaatttcaatggccgttggagcgacttccctgcaagtgccagctcagtgcaaagtgacatggggcaagtgccgggaaagatgcactggtggggtgtaaagactaagcgcgctccgacatgatgaaatctgcgtgctcggataggggtttgagtcgaacgcccagcatgatcaggcctaaagggcaacaacaaagctggaaggcggacctggtctggcttgtatcattgacaatgttggcaggaacgaccaatcgcttcttttgcggtggcggcaaatccggctcgacgtcgggtatgttttgatgagtagttgtgcatacaggctgtcaggactgcctcgtatataaattgatatgatcgttggcggcaggaccagcggcagagtggccctgcagtagcctgcagccgcgacagctcagattgaagaaggcatttactatggaattctgaatctccggccctttcatcggcatgaattccgtcagcatcgagcaagagatccataattggcgtaaggccgcgctagcgactgtcacggcgcttgcaatggccttgctcgacgagactaaggttgacaacgccaatcatcgaggcagatgaccgcaggcgatccaaaagcttctcgctgcgtttccattcagggagccgctaaaggccgacattttgcttgacctacctaacgcgtgcgacgtgcgacggccagactccaatacaattcaatcaaatacgtcacccgtcctccacttgttcgagacccgcgtgtcgcccgtttcatagtattcccaaggtgctcgacttcggctccaaatgctaacatgtcctcaacacttgcaagacggcgaggcgcaacatgcatgcatatgagcgagaagaacatcgtggtcaggattgcttgtagaagagggtcggcaaagctgaccagtattcctcgggtgggcaagcaaaaaacaggcaaaaaacgagttgtgcgggcaaagaagatggggcgtatcatacaaagagggcagaaaggggcgactaagaactagaaaaaggatgaagaaagggggacgacaaggactagccagaagttgtcgaaacttatcgctaggtcgaggcgaggacgttgagggctgcctcgggccgatgaggaatacaagctccaatctaatggaaggggagaagtgggggacgggagcgctggggatgagcttcgttgagtagccgcaaaaaagcagaaagataaattgacagacggatctcaagggccaaacttggccgtctgcctggcgatcattttatcgaagacgtcgcagttatcctcgtctcagcagtcgtcgccggagacaggcggccgtaactgggtgcgactttatgtctctatcaacgcacgagctttgagcgcagccgagatccctcttttcgacaaacctagctctgctcgttcccgcggacggagtgcgccttgccgcagccgagtttgcacggaagccagccgatcgtgcagacgccgtcagcgcctcggtgcatgaatcgacgttctcggtttgaacgacagtctcgcctgttgccgccttttggatgttatgagcgagggggacgctgtcgtgctgtccgagctggaagtagagccggtacaaaggacccggccggccttagaaggcttgagcgtccggggcctcgaggctgagcaccgctatggcggagcggtgagcgagcacgattggctcgacgttgtccacgagcgcctagagccccttgacgttcgtgagcggcgtcgacgacctcttcattaggtcggatggcaggcttaagctgcttgccacttgggttagaaaggcggcacgaagtgagtcagcaggcatggccgcattagcctcgccgtgcgggtgcagcgtgaggatgaagaagtcgggctcaatttcgttgagatgcccgatgacaaagaagacgagctggaaaggagacgcaaggacaaaagacgagcgaggttagagggcaagtcactcattcaaacaagcacgagagaaagcagttgatgagatggtaaagctcttcttgtcccaaccctcgccgccgagtcccttgttttccttcttctctccttctactcgctcgcccttctcctccaccgtcgccctgagtgataagattcgaggagtcgtttgagacgaagtcactgcccttgccatcctcctctccccttctcgcgctttccctctttccgctcgtccctcgtgcgccgccggctccgtctcttgcctaagttcgcacgcctgtgagggctgagcgtgcgaacgtaccatcgttacgtcgacgacctggacaaacctctcgttccgccggcacttgatggtcgcgtacgactcggcgtgcgcatggccgatcgtagtgttcctggtagtgcccaacgcggcggttggaagaggtgaagcgtgcctgagtaagagatcgcgaaagtgacgaggcagcaaagtcgaggggtcagcgcaagaatatacagggaaacagggacggacgagcgaggtaaaggaggaggggcgagcagcaaggcgaaagcgagcgggcaacgaggaacgagcggcaagaaggggaaaggcgaaggaggggcaagcggttaggcgaggagcaaaggaggcgggtaaggcagggagggagcaagacgggcgaggagtgttcgccaagccactctcggatttacgcgtgcgagtcgatgcgcaaggtagagggcctcgttgaggtgcttctgggcagaagagcgactgtagaggtttgccgggtagggaagccggacaaagatgagatggacggcacccgaggcgtcgagatgatgtcctttggaaataagcaggaagtcggggtcatcaacgtaagaggcagagcgacctcgagcgcgcacaaatggccttagcccgagcctcaatttcgacccaccggcctgcatgcgcaagcaggctaacattgtgctgcacccagatggcgaggatacacagcctccggtccccaacctcattgcggatgcaatcacggagtgcgctttggacgtcgagctcaagacctaggagaagggcggcgccgtcttttacagcctccattgccgtctcggtcagcatgggggcatcaaatacctggacgccactggtgtaagcaggggtcgatcgttcgtatgactgttttagggtctgggtctgaatgtcggcgatggtcatatggacgagtaagccagagcggcgacagtcagccaagacaggtcaaacaaaactgagacaaggaccggcccagcgcacaaaagcgcgacactgccaagcaggcgcgcgacaagctggcgaggaccgtgcttaaggacgacgagctgttcaggaggcaggtcacatgatgcatgtcggctttgctgtattttagtcgtggtgggagggaagaagtcggaccgaaaggaaggagggctatctggcggccgcggtatcttcgatggccatgtcgacgatgagctattggtcctcgcggttgtcgcccttcatctgaaaataggtagatgacaggacctcgtcggtcttgaggcgccgcaagaaactcttgaggccgtccggcgagagccgcttctccagtcggaaggcctgctagatgaccttcatcgtgtcattggtcttggctagcaacatgggagtggcgaattagcgcgacagcgcgagcaccccctccccgactgtcgtaagcccttggccggccgtaacctttcggctgagcttgaccttgagcggggccggggtggctttcgccgttttgcgagcgcgggtggagctgacgttgaagtcgtcttcctcgtcattgtcgtcttcgtcctcgtctcgagtgagacggaggcctcggtcttgagggtggcagccgagccggcagcagacgaggtcggccgggctggagagcggccggcgtcgtcctcgacgaccgcggtgcccgtggccagcgtcccttacaagagcagcttcatgtccccagccagggtctagccacttgttctcgaccgagtcgacggttcggccggtcacctttgccgccgctcgccaagtaatgcgctgatgaggcgaaggatgaggagcttgattagtaggtgctcggcctaaggagtaggaagtgcatgacagaggatatacggggaagcggggccgtcatccttgccttaccgttcgctttcgacaaaaggtcgaccattgaccgggcctcaaagtttgtccagcttgctcacttgggcttgacctcgagctcatgcctcaaatacgggcgagccagcctgggtcatctcaagtgtgttgatcttgagcttgtggtcggccgtgggtggaggcgagctgagttgaggcggtgccggccgtggtcggacgtgagccatgcgcttgccctcagccttgaggccgggaaactttcaagggcgctacggaggctggcgaaccgccaggctcgacaacgccgaagcggccgccagcctcatcgaatcagcggccctcgaagagggcggtcgactgatgaagctagagaggaggaggagggcagctgcgctgttgaccttcttgacgagcgtcttgcgcgtaagtgagcggcgtcggctaaggccaatgaatcagtggtcccttcttgaacgagcgcagcttactcatccaggtgtatgacataggtcgcgacctgccgtcgacgatcgagctatttttgttgtgagttcagcttatttgaagacgagaaaagctgctcgtagccatccccgtcctccaggccgatgcccttgacccgccgaggcagacgctcgacttaacacttctgctggtgcgcaccgccgtgcagagagccgatgcctgtgagagcaaattgttgaaggaagagcgtcgtggtagttttgcgggagggtcgccagcgccggcacgctgcagcgcccgcccgcgcggcggcgccggaagttagggttacgcttcatcgaacgtaacacgctttacctccctccgtaacatcactctcttgcccttacggcttcctccctcatagcaattttcccccctcctgctcctctgccgttcctcgcgttgccctcatcgacagccatccaggtcgtccagggcaggcccagcgagagcctcgtactctgtacgctctccatttgatgactctcggcccgtcccccgcgcctgccccgccgcccatagcagcggagggtcgagtggtggtccgaaggcagggctggccgaggcttgctggcgacagtcgacagcaagggctgcctgcgagtgacaagccgtcgcactcgtccacctgacgtactctttagacggcgaaacaaagcattttagaagccaaaggccgacatgtcaaactcctgggcgccttgctttgcgtcttgcttggcagcctgaatgagcgatccgaggcccgtcttcttaacaaccggcgacgtcggctggacgacagggctctctggccgggccgcatccagtgctgggttcgagatacgctcgggcgaaggcacgcgcgtcggcagctccgatggcggcaggtccatgtcgatgaccatcgtcgagccccggcggccgtcgcggaggaaggacgacggccggcggacgtggcgtgcggcaggccggccagacgcgcgcgagagcgagctgaaggccgagcctccgccgccgtcgagggagaagaggtcgtcagccgaggactcaaatggcgaaggcgcggccgaatgtgttgcagctgctgatggtgtgacggatggcgatggcgcacgcgagatgcgctccggccggtcaaacgcccacgagcggacgaggtcgaggccgaggacatggcagcctacgagagtccggagagaaccagcggcggaggggctcagcagctgttcgcagaggaagagtaaggcagctggcgcgcggtctcacccatccgcgtaaagacgcgtgcgttgtgcaggacaaagttgaattctgtccgctccggcacctcactcgagcctttggccgtttggagcgtgagcgatttgatctgcgaaaacagcagcgcgagcgacgggtcgtcgtcgtgcggttcggcgacggccgtcacctcaaagtcgacatcgtgtcgcaggtcggccagcggggtctgcgaggagccggcggcggcgtcaatcgacgaagcgctatatcgatcgatagggcaggctactgacaatgaggatgcggacggccaggtccctccgcttgagcatccagaacgcccacgttccaagccagcgatgaccgccggcaaagacgcgggggaggaccgtcgtccggataatcgtcttgagcaccgggccgtcgtcgccctcgacgacgcgggcgagcgcgacggcgagctgaaagtcgttgagctgcttgacgcagacgttgaccgcatccttgaggctaccaccgagcaggaagaaagcggccgcgtattctgccgttgcgctgggaggtcagcgagaggggcgcgcgtgcgagagggtcaatatcaggacggaccaaagcggcgcttgctcatgagcgcgaacgcattcttgagcgcagccgtctgccagcgctcgaggctgaagtcgttgccgagaaacttgagcataaccttttgctcgggatgccaggctgcctgcttccagagcccctggacgagcttgaccttgccgagcgcaaagtagtagagcgagcatgccgtcgggtcgcggtcgtcgccccgcatgtattcgtttcgtgcaacaacctccatctgtgctctctgggtgaccagaacgcgaggccgacttgtcaagaggaggagacagagggtgacggagatggcgcgacgtacaagggactcttggctcctcagccagaggaagacgccgagcgcctttgcgtcctgccagcgcatcttgcgctcgtcgcatgcttcggtcgaggcgctgagcaagatctcttgactctggctgtggtaagcccagacgacgttgcggaagctcagccggccgtgccggtgcccggcgcagcccgtctcggccggagcgtgcacatcgtggacagaaggcgcggccgaaggcgtcggcgtcgggcgagaccgccagttgatgtggaagcggagcgagatcaggtagcgcaggccattgacgtcgagcgagcgctgcagatcgtcgatctgtcaagtgagagatttgtcaggcggctggagcgagggccgagcaggccggaagactgacctcgagaaccgtttgaacgaggatgcgcaagtgttcgcgctcatgctcggtcagagcgagcgggaaggcgccgctcagatgctcaagcagccggtcgatgaggcggcggccgaactcgttaccgttctcgctgctcgtgcaaaagcggcgctgtcagtgaccaagactctcgtcccttcgtctcagaccacggctacacactctgcagctgcttcgtcaacgtcgtcgaacagccccgtgtagcgacccttccttgtgatcgacgagggcaggagcttagcgacggtgctcgagtcgctgttgaagccgaagaaggcctcgctgtcaaacggcgtccactcgagctcgtccttgccgtcgttcagcgtcgcctcgattgacaggtagagctgggtgatgatctttttgacgagctcgaccttgtctgcaaaggtcggcagctgggattagcaaggagcgtcaacgaagcggagaaaggaagcagcgcactccacaataagcactggagcaggagctgcgggtgccagtcgaccagcggcgcgttgtgcagcgcaacgctctcaaagaggtcgcggcccttcctccgagcgacgccggccttgcgctcggcgagaggatagcggatctcgcgcgagtggagaaagacggtggcatcggagccgatggcgagcgtgccctccgagagccagatggagtcgcggatcgggtgcggcgtgaggctgacaacagggtgaggatgcaaagttgtcagcgacgacaagcgctaaaactaggcagtggccgggatgcacatcgagacggggatcgtcaagagcggcgcccagtagctcgcatgctcccctccgtcgccgtcagttgccgccaggtagctcatctgctgctcgcacagcaacaggatgtggtcgcggaagccgactgccaagacggaagccttgtcgggcgtcgacgtccagtcgagatcgaggatcggcgactcgggcctgcgagaaaaacagataatcagccagcagcgtgtcaagaaagagcggtatctcatgaacgaacgggtaagacgccgagtactcgaggccagagtagaactcggatgactttgagtcccagatcgtcagctcttgacgcagaacgcccggttggccgacttcatttggctgatccgtcttccaagagacgaggaccgtcttctttgcactgctgcaccggatccggacggggctacggccgtcgacgccttcctcgcggccgcctgcgagcgtcttgcctgacctggcaagcgtcttgccggtccggacacagccgccgagcgaccaggtgaggccaggggcgaaaccgccctcccaagggctccaatactcgagttggccgctggcacggacgacgagcaggagatcttgcagcggtcgaggcacgccgccggtctctccgttcggtcccgtgccggaccagtcgacgacggtcgaccgccaggccatcgggtcgacaggcaggatgtcgacgatcgacccgccccgaacgtctcccccctccgcaagaggcgtcggcaggacaaagatcgacaagaggtcgaccttgggctcgtgcgaggcttcgccgacgggaccttcggaccggacgagcgaccacgtgtagaccttgcctgaggcagacgccgcaaggatgagcgagtgcgacggcgtcagcgacgagggcgagatgccgtcgtcgatattggagaggccgacgagcgtcgtcagagtctcgtccttcgggaggcccaggagcaaggtgcgctcggtcggcgccagaggctcaccgtgcccgtcgacgtgctgtgcctttggccggaggtagcggatgccgacctcgcggcgctctcgatcccagcagacgacactccgcccgcgggcaaagagcgcccagagcgcctctccctcgcgccgatcccaccgcgcgcgaaccgaccagtcgccggcttttttgcctttgctcctggcgggcatgaaagaaagaacgaccatttcggccgagccctcgacaaggacagagcgcccattcggcgtgcggtgcaggcgctggatcgagcccttgcgcatggttgccgacgacacggtcggtgccggtttgctctgccgtgccaatgcaaaggacgaggccgagatggcgacggcgacgggaatgccgcccgacgcggtccgaatgagagtcgaggcgtcgagcgcggtcgtccagcctggatgtgcggccgacggctgattcgaagccggctttcgagcacctgcagcacctgtaccctgagacgtcgccgaggtgacgagctttgagctgctctgcgcgaggccgacgacgtcaaaggcgacacggccggcaacgccatcgctcctcgggctggcagcaacgaagcgctgctttggcccattcagcgcacgaggctttacgggcggcgggggtagcgcgtgcagactctcgtcgcctggcgctgccgaaagggtgtggatgagcgcaaagtggttcgggtcgtcgaggatcgtcgcgtaaaagtgaaccgccgttgcccggccgagagcgcccttgccgtcgccggccgaagtcgtgctcgtcaggaggacttgggcgcccttggagccgccgtcggacgaggcgccgtccttccaccattcgaggccggtaacaatacgctggccggaggagctgattttgagggcctgcccgggttgaggtgctcgagcgccagagcggttgcaagcagaaggcttgcggaggcagccgtcagcatagagagtgaggatgcggacatcagcagcaggctcgtcttgccaccagcgtgcgcggtgagttgggcgagagggtcgggacgggtccctcaagggacagaacgccagatggagcccgtttggcgagatgacgggcgggatgacgactgcctttgctgccgagaactgggtccacttggatctcgacgctcgtagttgaatagacgtttcccagaggagggtccagagcggcgccggtgcgtcgagctcggtcgtgtagtagtagagcgcgctcctcgtctggaccgcaaggcggtctagaagcggcagcgacgtcgatggtcagccagcttgaagacgacgttgtcggcccccacaccgaaggggacgaaccggacgacagcgccagaccgagcacggcctcctcctcctcctccgcagcatcaccttctgctgcgatggcagcggcggcggcgggaagagcgaccgtcgaatgaacgacccagcgaccgtctctcgccgcttcctcttcgagcgatgaccggcgtggtccccagccgtttgtgagatcctcgacgggccgacgctcccagacgcagacgcgacggccggcgcagctcgcgatgcgctcgccagcagggtcggccgcgacgggacctaggggctgaacgggcacatcactcgccgctgctgtcgtccgggccgatggcggaggaggaaaagcgagcgatgtctgatagatgagcggaccgtctggcgctgatctgcggaggacgagcagggcctcggacgctgggtagatgacggtctgccgggcctcatctggcagggccagcggagggtaggccggcgcaggcaggagcggcggcaggccgacgagcgacatgggaaggcggcggcgcggacgaggaccgcggcggtcggtcggtcgggtcgagcagactgctgctaaagtaaagggggtgtccttgctggagggaattgtctcgtgatggcggtcaagagcgtcccacgagggggcccaagctgcccgacccatgctgctctctccttcgttggcaaccccccgccctcccaaccttcatgcggctactgcttttagcccggccgaccgcttcacgcttcttgaccttcactcccaccaccaccatctctgtccgcttctcctccagtacgtccgccgctcatctcgtcgctttgcgatcggccgaggggctcgccttctcgccagagcggcctcctccggcatgcggcgacctcggctgccgacggtcgttgcttcttgccatctttccaccatctcctaacccttgttcaaatcctcttcttcctctcttgccagcgatgtgctcctctactcttcagcaggcctaccggctgccgaccaacgtcaagccgctccactacgacgtgacgatccagacggacctggccgcgaagtcgttcaccggctttggctcggtcgtcctccgggttcaatcgctcccgttgacgtcgctcacgttcaacgccaacaaggcgctcgagctccgcgacattgccgtccacacgacggcgctcaagaccgactcggcctaccaggtcccggccaacaaggtctcgcgcgacgacaaggaggagcgcgtcacgctcgacctctcggacgcgggcctcgccggcgccggcctcaaggagggcgacgagatcacgctctcgctcggctggaagagcgcgcttgggacgtcgatggtcggctactacatctcgtcctacacgacggtcgacggcgacaaggacgcctacacgctcacccagtttgagtcgaccgacgcccgcaaggcgttcccctgctgggacgagcccgccctgaaggcaacctactcgctctcgatggtctcgcgggccgagctcgtcaacctgtccaacatgcccgtccacgacgagcggccgtacacgggctcgtcggccgcctgggaggagggcaagacgtcggccgcgggcgaggagggcaagacgacgggcaagacggtcggcaagctgctcaagacgctcaagacggagctcgagccggcgaccgacgacggaaagggcggctggaaggtgacgcggttcgagaagacgccgctcatgtcgacctatctcctcacatttgcctcgggcccgttcgagtaccgggccgacaagttccggtcgtcgaacggaaaggacgtcccgatccgcatctacgcgaccaaggacattgtccaccaggtcgactatgcgctcgaggtcacgcggctcgcgacgcccgtttacgagcagctcttcgacattccatttgccttgcccaagctcgattcgctcgtcgcgaccgactttgacgccggcgtgagtggcgcccctttgcgcgctgcacctcgctgcaatggaatctgatctctgctttttcgctctctcgtaggcgatggagggtgcgccctggtcgagctgtccgcggtctttgccgtcagacaactaacgcgatctcccgctctcccttgcaggctggggtctcatcaccggccggacgtcggtcctcctctgggacgagaagtcgggcctcgctgccaagaagcgcgtcggcacggtccaggtgggtcttgagacgattttcagcccagatctcagtcactgaccctagtcgcatgctctcccttgctcgcagtcgcacgagattgcccaccagtggttcggtgcgctgcgcctcggatcggctgcttacgttaagcggcttcgctaacccctttgcttcctttgcgcacctcttcaggcaacctcgtcacgatggagtggtgggagcagctgtgtgagtcgccgcgcgccaccgtttacgatcgtcgccgcttgctgatttagcgccccgctttgtcaccctccagggctcaatgaggcgttcgctaccctctgcggcgaagtgcgtcactggctcttccctcagtgcctgacctttggcgccgtctgacatgctcctgccgcgctcgtccgcaggtcatcatcccagaccggctttaccccgagtggaaggtccgccagtcgttcatcaccgaccacttgttccgcgcgctcgagctcgatgccaagcgatcgtcgcacccgatcgaggtcgactgccctgacgccaacaagatcaacgagtgcggccgggcttgtgtcgcgtcggtggcgaccgcgagctaacccttcttcgcccccccccccccttgcaggatctttgacgccatctcgtactcgaagggcgcctcggtcctccgcatgctgtccgagattgtcggcgaggaggccttcctcaagggcgtctcgctttacctcaaggcaaagtcgttttcgaacggcgtcaccggcgacctgctcgacggcatctcggaggcctcgggccgcgacgtcaaggagattgcccgaaactggacgaccaaggtcggcttcccggttgtcagcgcgacggcgactgccgacggcaaggtcaaggtccgccaggaccgcttcctcgccaccggcgacgttaaggacgaggagaaccagacgctctggtgcgtccctgtcgctcgcgtcccgcttaagtggctggactgacctgactcctcacccctcgtaacaggcacatccctctcggcctgctgaccgtcggcaaggacggaaagtccaaggtcgacaagttaatcatcctctcggacaaggaggtcgagctttcagtcgacgctggcgcgctctggaagctcaacgccggcacgaccggcgtcttccgcgtcgcctacgatgccgagcacctcgactcgctcggtaccgaggcctcgaagaaagattccgccctttcgcccgaggaccggtgcgttccgcttgtagctcgcttgcgtaaggacgtggagctgacccggttcatcttacagcgtcggcctcgtctcggatgcctttacgctcgcccgggccggctactcgccgactgacggtctcctctcgctcatctcgcacttcaaaaacgaggagaccaaggttgtctggacctcggtcgcgacggcgattgccgagctcaagagcgtctggtgggagcagcccgagcccgtccggtcgtcgctgacggcccttcagctgtcgatctttgcgcctctctcggaccggctcggctttgccttcccggccggcgaggagcccgacctcaaggagctccgcgcgctggcgttttcgatggcgggtctcgcaggccacaagcccgtcgtcgagtttgcgctcgcagagtttgccaagtttgtcgacggtaaggacattgagcccgacctccagcggtcgatcttccagctcgtgcgtcgtcctaatcttccgctcctgtcggcccgttcctgacgtccgtcgttgatgttccctgtctgcaggccgtcgtcaacaagggtaaagaggcgtacgaccaggtgctggccgtctaccgcaaagcggccaacccgtcgcagaagattgccgcaatcgccgccctgacgcggaccgaggacgcggcactcatccagcagacgctcgacatgattgcgacgcccgaggtcaaggaccaggacgttctcatcttcctcggctcgctctcggccaatgcgcaggcacggcgcaagacggcagactggttcacggcagagtacgacgtcctcttcaagcggttcgagacgacgatgacggtccgtccccttgggcgaaacgagcgagagagagtctgtccgaaactgtcggtcggctgacgtgagagttctcgattttgcgcttttgcagatgccccggctcgtcatctacgccctctcggacctctcgtcccagaccgaccacgacgcgatgaaggccttctttgccgagaaggacacgggccggtgcgtcctcccccccccggcaggaggccacactactaacgtttcccgcaccacctgagagagcatgtagacttaacatacatagaacagtccagagtgatggggtaccgcggtcgggcatagtgtgccttggaaaaagatatccactacgttgtaacgcaaggacggcatttgtgaaaagagtggctagaattctgaaagggagccctgcccggcctttcaatttacagccctggagacaccggagctacccgatgcgcgctagagcgctataaccttcaccttcctgctgttaggcaggacgatgctggagataactctactagacgtcatacgtcctgtagaaagggtttccaatcccttctacagtacaaaacgtaccacctctctcttcccctcgtacggacggtagtgcagctttcaatgggcacctccctagagaggtgaattcattgccgtgcgggagcgttccagggttcggcttcctgccccgaaagggcaggcgtgaaccacaagaggcaccggcagggaggcccgtaatgtaaccatccatccattgttttgtgctgcggtgaggacacacagcaggcttcgatttgtcaggaggactgtcgttgtcctccttttccagcctgaccgccccgtgaagggcgcgcttttttgtttgagatacctctagaaaggccgtactcatagctcactggcttcaatcagattcagtgagacaccattttatggagtggtgttgtcgtctccccgttctcgcgcgggctgtttttcagatgggttgagactaaggttgtctgtaaggtactacccttacgcacagatttccgagttgtatctgtcccaatggccctatcccaaggctccactgggtgtaggtctaatagcgtagacccgtcgccgctttatgccttacggctcttcgctttcgcgtcatctcttcgctgaagagatcccgttggtcgaggacgggggtcggttcttttaaacgggaaaccgcctgttctagtgcaggcaaaaccctaacgtgttaatacaatgtgtcctcccaccattggctccctatagaggagataaaaccttgggcaggtcgtccttggagcagtcaaacaccagggccacgccgattctttggtttctagccatccggccagggtggtaggaggagcagagctcctctcaccggctcccggtaggcctagacgcacgccgttggtggcaaaccaacggtatacggggcgcgattgtccacataccctcttgaactgccctctctctttggcccgcatcgtcccatggcttgggatcttgaaggaggaggaggacagcagatgtggcgttcactttagctaggagctcgccacgggacgaagattgttcctcgcccgcgtttacaagaggtagagatgggtcgtggaggctatgaggtcttgcattacttaaggattgacagcccttgttttcacactatacaggacggcagagttgttacccttgccacgccctgtacacgattctcaaagcccgaaggctgatccctctctccgctgggcgtcccgggacgccctcctcgccgacggatactggcggcactttatgtcacatttcgcagacaagcctaggtggtttaagcctagacctccacagaatgcatggctatgcggggccgaacgcaggcacgggcttacacccagaacgaaaatcacactggctaaggcgtggttccggtctcgggtgaactggataccgatctctcctctacggcaacgaggtagattggcgtggagagggttggtatctagtcaaagccttgaggtctccagcggagccgacagatagacggatagtccacctggctcgtactcggagaccccagggctgggtttgtgcgatgcggagagggctggctacagccctactctactccgatgcggtgcaccgggcgggtgtggagattctgtctcctttgaattgggtcggcgtgccgttaagggctggaatcgaaccagcagatacgccaaaagcaccaacaggttagcgcttgtagagggtgcccgagggcaccgcaatcagcatagggaatcgaaccctcattgcggcagacctgccgagtatttccattatacgatactgataagtttttggtttgagcggtgcccttgggcaccgtaagcagtggaggggatcgaaccctcgtcgtggcgagctaggagctctccatgtacttccattatacgacaccgctacacctccataacccagatcaaaactttagtgtgcactttgttagaagcctatgcggaagcttcgaaggacgcccttacagcgaaatacaaactcaggtcatacgcagccaggccgcttttccttctttccccgaggggttcagccgagtagggttttagttcttttaatatttcctggaccaccagaggcttttacgacagaaccggatcgatcacccgcttgcacggatgacaagagctctagtcactcccatccttgacaattggaccatctctgctacctcatccacccggagtattggtagttcaactgtttgggttgtgcagcgtcatgtgcagtaatgctccgcgggttgccccgcgagtcaatctaacctcgttcaccccaccaggctgctttcgcacgacctccctgtcacaggaaaccgcagtggaaccccaaacagcagaaggaatcgaaccctcgttgcggcagcccgccgagtactaccattatacgatgctgctagattgcctctttaacgaggcgtcagaggccccgaccctggagcccagggctcaaacgaacaggccccggcaacgggtcccgtccaggtgccctctatggagagggccacccacgtccaagcctgccctctcgtgagacgggcccgaaagccgggcgcccacgaaagtgcagattttcagtatcctcttcccacgtgcctcaatgccctcagcacattctaagcgagaatactccggcgacaagctaccgtctgccgacccctggccgcaggcccacctgcgtccgtggccctcttcggcccggaggacactgagagcgggcctccgcccccacgactgcccaacgctagcggcgtctcttataggagagggcaaagagaagactccaacgggagctctccccgcccgggctagaaggcgcctccagtgaggagggctccagcgagcccggcaagggcaagcagcatggaaagcacgagctggtgagagagccctccggaaagggtgagccctccaacccgcaccgcggcgcccgctgccagcgaggaggccccaaagggccccgccgcctcgaacaggccccggtccaggaactggctcgtgtagcccgctacccgaagcccggccgtaaagaccgcgctgcttagggctgtaaagcccacgacccctgctaccgaggccatcccagagcctaccccggcatagccgagaagggcaccaacgaggccggcaaggtagggagcacagacgcccagcccggaggccgagagctcatcgtccagtgagcgtgtccacggggttccaccgctaaacagctctccaaacgagagaaaggtacccgagagcaggtaacctccgaaaaggctagccgttgccagaagggccactgcaatcccaccagggtagaatgcgctgcccaaccccgcctccggcgctcccagcagcgtgtgcaagggagcccgtgggcagccctcgaacgccagccggtggagccggatggagtaggctacggtgagcccgatcgacccgatggcgagccaccagaccgtgttgtccaggagtagcccacgtccggctgccccgaccacaaggaggtctttcccgaactctcccgaggtaaagggtagggcacatagcgcggccgcagcgacaagcatcgccgagccggcaaagggcatgatggcgcctaggccacccatgccccgcaggtcctgcaccccggacagcccgtggatcaccatcccggccccaaggaacagggtggccttgtaggccgcgtgcagcgagagcagggcaagtccacttgtaaactggcccgttcccaccgcaagcatgacgagggcaatctgcgaacaggttgaaaacgcaatgactcgtttcaggtccatctggcctagcccaaccaccccggcaaacagggtggtgcaggctccaagggtggcagctaccgcggttgcggaggaggcagaaagcacaggagcgcactgcacgagcaggaacaccccggcggtgaccagggtcgctgcatggatcagcgcactcaccggggtgggcgcctccatcgcgttaggcagccaggcgtgaagcccgagctgggcgctctttccagctgccgcaacgagcaggaggaagagcagtactcggccctctcccggtccgaaaacaagcccggcaaacgcggtccctccgtagagggctagagcggctgccagggcaagggtgagggccatgtcaccggctcggttgagcaggaaggcttggatcgcactggagactgcggcaagccgagagctccagtaggcaacgagcaggtaggacaccaccccgatcccttcccagccgagaaagagggtcagcatggtaccgcccgtggctgtaacaagcataaatccggtaaacgccgagatcaagccgaagaagtgggcggtgtttgggtcaccctccatgtaccagagagagtacaggtggacgctaaggctaacggtacataccaccacggccagggcggccgacgccggagtgaggacgagggaggcctcgagggcgagaggcccagttgggtagagcgatagccctcccaactggacaacggtgcccgagtagagcacctcgtaggcgagaaggagagcggctactcagctgcctccgagaaggaggcatgcggtgagggcggtccctaggggagaggcttttcggctaagcaaagaagcggcggccccgataaagggaaggaggacgagaaggccgagcattagtccgtgtcgtaggcggttccactgtagagggcgacgacgagggagagcccgatcgccgtctcagccccagcaacgcacacaacaagcaacgcatgggcgtatccgtcggggctgccggacgccagggaggcaaggatgagggcgctgttcacgcccagcagcatcacctccaggcagaagatcttgccgagcaggcttgaccctgtcagggtaaagccagccgcgccgatgccggtaagggccagtccaaaggtcatgagtaagtggaaggggccgaggtcggccaggaaaaaggaggctcagggcgccgttggggtgggagggagttgaaccctccgccgcggtctggggcaaagggccctttgaggggcagcagaccgggcaagccgttcaccccgaggggcgggttcgtttacgatccctcgcaagagatgcgacccgcgggtgggctacgcctcggctacaacagccgagggaagcgcgctaaaggcgtgcagcggggtgggcgaggcaacgacccagtcgagccccgtcgcagaggccccactgcttacagcagcgctagaggcaaaggaggcgttttcccagacgtcgtgggaggcgacgaccggtccactgctgaaggccatgcctacaaggacaaggaagacgacaaccgaggcgctagagaggattgagccaaaggagctcacccggttccacccaaggaaggcgtccgggaagtcggggattcgacgcggcatacctcctagccccaggaagtgctgagggaagaaggtaaggtttactccgataaagagcagcgcaaagtgcagtttcccgagcgtttcgctcaggagccggccagtgattttagggaaccagtagtacagggccgagaagagcccgaacaccgcccccatcgagagcacgtagtggaagtgcgcaaccacatagtaggtgtcgtgcatggccacgtccagagaggcgttggccaggatgacacctgttacacctcccattgtgaagagtccaaggaaaccgatggcaaacagcatcgctgtactgtactccacccggcctccgtacacggtagccaaccacgagaagattttgatcccggtaggcaccgcgatcaccatggtggccgcggtaaagtaggcccgcgagtcaacgtccattcccacggtaaacatgtggtggctccagacaacgaaccctagcaccccgatgcttatcatcgcgtacaccattcccaggtatccgaagatcggtttgcttgagaaggtctgcacaacgtggcttacgatcccgaaagccgggatgataagaatgtacacctcggggtgtccaaagaaccagaacaggtgctggtagagcaccgggtccccgcccccggcggggtcgtagaagctggtgctgaagttacggtccgtcaggagcattgtaatagcacccgctagaacgggtaggctaagcagcagtagaacggctgtgaccatgaccgcccaggtaaagagcggcacccggtccaacgtgatcccgggcgcccgcatcgaccacagggtaacgataaagttaatcgctcccagggttgaggagatcccggcaaggtgcagggcgaagatcgccaggtccacgctcgcccccgagtgagagcccagggcgctcaacggagggtacacggtccacccggttccggccccctgctccaccagcgcgctaagaagcagcagaaggatcgagctaggcaggagccagaagctgatgttgtttagtcgaggaaacgccatgtcgacggccccgatctgaacgggcaggaagtagtttccaaacccgcctaccagggcaggcatcaccatgtagaagatcataaggaaggcgtgagcagagatcaccgcgttgtagagctggtggtccgcaccaaggacctgcgttcccaggttggcgagctcggctcggatccccatagagaacgccgtccccagcattccggcaagggcgccaaagacaaggtacagggtaccgatatctttcgcgtttgtggacaggagtcatcgctgaaccataggaagagtgggaggaaaaacggatacctaggggaggggcgccccggaggggcacggtggggttgtgggtgaggcccgtggggccttagtgtttaccatccgcagcaagttcccttaccacgactgtgtttcaacttataacccgttgctgcagcccgtactagcacccgtgggcagctattggagagcgacaacttcaggtcattgatgagcaatgagtgcacaacgcgagcttccttcaccgccccatggggatgggcgattactcagcactacgacttcggcagggcggatttcagcccttcgtccgtcagggtcacgcgggcaggttaggcccggagggcaggacggctatagcccaacgcatgaagaccatatcggctagtcttattatctgtagcctgacacttgggcagcggtcacgccatgccctgatcaggagccgaaccagaagggtccagccagataccgcacccgttacaagagcaaactatactgctgatgccacgagctggagacagccatgcaatcccggagaaggtttacccttctaccagcgctggtaagatgagtagtggggcatctcattaaacaccatcctccgtgctgtgagtcgcgtcactgtctaatcatttggttgtccgcactgttgctttgacattaccgcccaggtgagggtcttgcgcttcgcaaggcaccgctaggccgatgggcccagagcggtgcttgaccctatagttaacaggccattgtagggcggtctctaatcgccttccaatcgtatttgcctttctgttcttggcttcggctgccgcatcgccagttgcatttgcatccgagtgttcagcgaagaggtcaacgttacatcacctctcgctctaggctcatctggcacgggcggcagcgataggtagaggtctacccgcctacaacaactataaacccaggtatcacatccaaggcttggaggctacgtgttaccgcgtctgctggcacgtaagttagaccctcctggttcctcccggcggcccggtggggcggcgggagacggataagattatccgcccaggcgtgcgcgatcactccgtaggagtatggtcgacaattcaacactgcaggcccaattgggcaagggtttatacaccctcagtgaggattgaggctcttgcctacatcccttgcttcctgctgccgcatgcggccgcattccgcgtcctaccgtacagggcgtacggcaggctcctcacttacccggccagcgcacattggcagtgcctgtgcagcggctgggttgcatgtgtaattcacgccgggaacgcctttagactggaccatgattaaatccattccggtgtaggagctcagggctccctgtagtgaaggcaggccttcaacggatagggggtgcgcggcggcaccccggggttctactggcttagaagccaggagaggtactctcccacggggacggctcgtaccgagataggcatgaaaccgtggtagactccacagagctcagagcactggccgaagtaggttccgtctcgctcggcgagcgtacttgtctggttcagtcggccagggatggcgtctagttttactcccaggctgggcaccgcccaggagtggatcacgtctgtggagctgagcacgaatcggacgtgagctcccgtaggaatcaccacctgctcatctacggccagaagccgcagcccaccctcctccaggtcgccggtcggctggaggtagctgtcgaaggcgacaccctcgccgtcggcggtctggtcgctgtactcgtagctccagaaccactggtggcctagaactttcacggtcagggagggagaaaccacctcgtccatgaggtacagaagccggaacgatgggaaggcaaccgccaccagcaagagtgcaggcgacaccgtccagatcagctcaagggctgttccatgggtcaggtatttggcgctcaccgggttgccaccgaatcgcgcagccattgcggcaagcatgtagaagactccgactacgattgcaaccacgtaaaacattaccgagctgtgtagctcagcaatcccttcgaatgcaaccgaagccccatcctggaagccaaggctccaggcagatggtgcgtcagcacggaaagccgttacaaaggtaaaggcagtcataggagttgcagaaatccggcttttcaggactttctccacctgtcgctcaatagcggcagtacattttcagatcgagtgggtcaaagagagtcgccacgcgccccgcgtcgggtgtccccagcgtccgtgcaggggtgccctcgcacgggtggtcacccgaggcccgcatcgggtgtacctaacacccatgcgagaccatctcacggggagtatatacttcgtataggagacatccctagatgtcactctgtatactcctggtgtcccgtctccatgaccgatcggtcatggagacgggacaccaggagtatacagagtgacatctagggatgtctcctatacgagaagacaggcacgtcgcgctgcgttcaaagggaggaggccgcctggacgacggcgactcgagcgacgagagcgcagaggcctctggcagaccgagaccgtcaacgtatgagctcggcaagatgcctgaccaggccaggccaggctagagaaagagagtgatcgttcggagcaacaggagcaaggcggctctccctgctcgccttcgccggtcgccgccgctctcgagcccgtccctcgacgacgcctgccagaacgcttgtgctcgaccttctcggaccctcttagacccttgttgcctcctcttgctcgctctgccagtgcccctgctcctgctggcgatgccgttcactccggctgtcgtcgtcgtccgggccgccgcttcccgttcgaccgtcgccggccagcccatcccggtcgtcggccgaccgttcaaatcggctgccgtcagaggtcgcagctactcctttccagcaaggtcgtcgacaggtggtgcttctccggcctcacctcgcgacctggcagacggccgcctgacaggcagctcgagcgcaggaggcagcacgagtcgctggccgctgcggggcttgttcctctcttcaccgaccctctcacctcgtcggtcgctcggactcgcccggtcgtatgccgctcggtcgagcatggccaaagtggcagtcccaccgccgttcagatcaatgagaccgcctagcttccagcttgatcggcctgtcctagagctggagccggcggcagcgggacccgacgaacctgcgccggtacccgaccccttcccgaccccgacggttatgctcgacccgaagagcctgcccttgtacgaccaccggacgtaccctgccggcatggcgcccgaggatcggccaaccgttctcctcaccaacgactccaagctggcagacgcggtcgtcccgtacctcggcaggtgcgtgctccgcagtcgcggcgccgggcgttagaccccttcgatcctttcgctgacctgtctgccatccgtctcggtgatagcgtcgtcggcatggatagtaggtcgctagttgagctgcccgcctgacttcgcagctgacaaggaactccaaccgcagtcgaatgggcgccgcagtacgtcgccagtgccgacgaccggcctgccgacaccacgctgacctcgtccgacctggccgcttgccccttaggttcatcaaaagcggcggcaccaacccgacagcgctgcttcagatctcggacgggcaaacaatcctgattgttcgtccgttgtcagacccgccggcgcactgcgactgactccggcctgcgtggcgcccgcttcacagatgcaggtctcctcgtgggctaaggactgcccgcccaacctgcgggcgttcctcaataatcccgaggtccacaagcttggggtcggcatcctgcgtacggtctgcgcgaacctagactaccattggctatgcgcaaggcaatggctgatcgccttcccacccacgcagccgacggcaagaagatccacaccgacctcggcgtccagtgcgccggcttacgcgagctggcagacctttctcctgtctatggggttagtgccctcgcatatcccgggcatctcattcgcgctgaagctgatggttggctcttgcgcctcgtccgtagcgctcgaagggcctcgcggcgtacgcggccgagtacctcggccaccagttgcccaagatcaagacggtgaccatgtcaaactgggcgtccaaaaatctttccgcggcccagatcgcctgtacgtccggcaagagggcaatgacgacccatcgaacgctttgactgactcgcggcccgacccgccttcgccgcagatgccgccaatgacgtccagagtgcggtccacatttactcggcgatgcgtctcaaggccctcgcgcaggctcagccgcgcacggacggctgggcttgggacgccccgtcggccgaggtccagaccggtcgaccgcgcgtgccacaggagctcatcgacgagatccaggccggcagccggctcgcaagcagcacgccgggctccttcccaccctttatgacgtccaacaagcgtcccgccgctcgtggcaagtcggccgggtttggcgtggcgagcagtcagaagctcggccggacgatgaccggtacgcccgttcaactcgtctatcggcctgaactgccgtcgctgatgccctcctcctcatcccggcaggccgcaacgtgatagacagcttggtcggcggacggttcgaccgctagatgcgcggcatggcaagcggatctgattggtcggtagatcaagccgaccatgacggcttgagcaggacgcttgacgaggcacacactgctggcaggcgtcccaacgtggctgcgccagcaacgctcgccgcctcagccatcacgctcgtcaaagcggatgatgacagctcttctcttgtcctgcctgttgtctctctccttgcactcgatgagcgattgcatgagactgctttgaccgaagcgtgtaggccgagtgccagtctgcagtacgcttcgcgacccgccgcgatgacgggacgacccccggtcgagtccgcctcaagctgctgcttgctcctcttcttccagaccatctccatcttcgaccatctcttctcccctctctggacccagctcatgcccccgcccgccttcttccctggctcgaccgctccgcgaccgcaggtcaacctctcgtccggcccgagcgcggccagctcgtccgccctcctctcgcaagcgcaggcccagcgaaccgcccgcgacgcccttcgggctcaggatcaggcggcccggaacattcagcgcgtctggcgagggtccaaggtgcgctcggcgacgcgtcgtcgctggcggaatgacgtccagagcggcgacctcgcctgggggagcgacggcctccgccgggtcgtctttggcgggctcgacgtcggtgacgattggtggacggcggtcctcgatggcagtgcgtatcatctcatgacagtcatcggtcctccttaatcatgtcttgccgtcgactggcagcctgaccctctatccccatcgctcgacaggcccgccggccctcctgctaccgctgcatcagccgccgccacagctcgactcgtacttcgccctcctccggttgctgtgccacaggctgctttacctcgcctcgaccgcctcgcatcggcagtcgacggcggcaccattccgggccctgccgctcctcctcgaccccaagtcgtacgcaggggcggccaaggaggatgacgccgcccgctgggtcggtcagcttcgcgagagcgtgcgcagcaccggcggcgtggaacttctcggccgggccatcagcaacatcgttcgtctgcgattgcctgccggtgtcatctttgtcaagttcttgctgacgggagatggactgctgccccggcctacaccagtctccgacagacaagaagcacccctcactaccaccgctagtcgcgacgcttgccctcctgctgcagacgcccctggcagaccccgccctcctcccgtcgctcacagatgcgattctcaccctccctctcctgccgaatcggctgccaatcccatctctgacccttctctcgcgatcattgccttggccggagatcctcgcggccgacccgacgccgcggctcaaaggccgcgccagcacggtcgccctcatcagcaacctctcggcttttggcgtctcgcgtgtcgcgagctggaagtctgcccagaaggagcagtgggcagctctcctcgcacggctgctcaactcgctcgacgcaccgctccagctgccgccggcggggttagcttcaatggccgctcactcgagccgacacgtttcggacgacgaggacgcgccccgcccagttgcgttgggcccggctctctcgccgaagactctgtcacacctcaccctcctcatctcaacggtacacctcggtgggttgctctcggcgccgagcgtcggcatctacgctttcgtgctcgccctcatcgaggcttggccggccaaggcgaaggatgtcctcgacgagttgggcaagcgccggggcgtcctccgtgagctctggcgaggcttcgtccggagcggtgatgtcggtcgcaggatcgtcgagaccggcggtggcaaaggcatcatcgatgcgctcgctggtgagtctgctctgcgccgcaacacgcctgcaggttggcgctgacgctacggctgcttctcaacctttcaagatgagcggctgcgcaactcatggtcacctttcctgctgttgaccgtcctcttcaacaaccacctgcactcgcttccggacgacgagttttttgcgccatctgcgccgctctcgatcgacgaggtcacctcgctctcggccctctggcgcaacgttgcctttgcgctctacatccacccgctcccagcaggcaagggcgtcacaggctggagcgcggagcgcgttcgcgaggtctgcgagcgcggcatggccgccgtctacgagcgcgaccagcgccggagctttgtcggcgacggccactggctgatgaccgacaccatcgacgttcggggctttgtcgatgcggctatgtgagtcgcacacgccactctccctgtcgatcaaaactcacggctgataagacgtacccgtccgcagcgccgaggaacaggacctcgataacgacgaccagccgatggacgtcgacgcaaccgacggcggggcgccgacgatccagagtctagccgcccggcgacggaagggcatctcgaagcgcaagctcgcattcctcagccctcgactcggcgtgctcaacaacatcccgcagacggtgcgttcgatggtcgccgaggttcgctcacgctaggtcgcaccgctgacgacgtgctgctaccgctcgcagatcccatttgaggtgcgcgtcgagatctttcgagcgttcatccggtgcgcgacacgtccagtccaatgggcttgtgtttgactggcggaggctgacgatctgcgcccctgcctttgcccacgcaggaacgacaagctccgcctcggcatcaaccgctactcgcgctcgtcaccaaaatacgcgacgacgatccggcggcacaaggtcgccgaggacggctacgcccagctcaacgcgattggcgccggtatgaagggcacggtcgccatcacctttgtcgaccagtggggccaggaggaggccggcatcgacggcggcggcgtcttcaaagagtttttgacctcgctttcgaccgaggtctttaacacggatcgtgggctctggcaggcgaccgagcagcaggagctctacccggcgccgacccagtacgcgaccgagtcgcaccagctcaactggtaccagttcatcggccgcgtccttggcaaggcgctctacgagggcatccttgccgacgtctcgtttgccggcttcttcctaaaaaagtggctcggccggcgaaccgacctcaatgacctcgcttcgctcgatcaggagctctaccagggcctgatcaagctcaagcagtttgacggcaatgtcgaggagctcgccctgacgtttacgctggacgtcgatgacttcggcgtgaccgagacggtcgagctcattccgaacggggtcaagtgggttgctgcttaatttggcgaaagtctgcggcgttcgactgacatcacctgtccccccctcgcagcatcggcgtgaccaaagccaaccggctgcagtacattgacctcgtcgccgcctttaagctcaacgcccagatggaccgccagtgcgcggcattctttggtgcgtgtgccagtcgcaacctggtcgacgagtcgagctgacgctgacactcctcttttcgacgcagccggcctgcaagacatcatcgacccaaagtggatccgtcttttcgaccagcgcgagctgcagatgctcgtcggcggcgtcgacatggatgtcggtccctttgcgagacgaggtccactgtgaacggattgctcggcaactgacgtctcaccctctaccatccactcccggacgcagatcgacatcgacgacctccggcgccacacggtcacccacggcctttcgccctcactgacggccgccttctggcgcgtcgttcaaggcttcactccggccgaacgccgccagctcgtccgctttgtcacgtcgtgcccgcggccgccgatgctcggcttcaaggagctcgagccgctctttgcggtccgggcgggcgagagtgacccgacgcggctgccgagcgcagcgacctgcgtcaacctactcaaactgccggcctacaaggtgcgtatatgatgccttgatgggtctgctgtcgcgccaaataggctgaccctttcgaccttccaggacgaagcgacgctcagggctaagctccttcaggccatcacctctgcggccggctttgacctgtcgtgagggcccggctcgcgcaccgacgtcttccgcttactggggggttgctcaggcactcgtatggcttctcctcgcagcgacatgacggcgacaggaagggggtgttacgatgcactctggccgaggggtcgcccgctcgaagcatgtgacgagcgagaagaagcgagaaggacgaccgtcgattaaggggccgctaagggtcttacgagaagaaaaagaatataaaaaagagggtgcatcgatcgaacgagcgcggatcgtgttagcgtccgtcgccctgcttgcttgcctgcgtgctctctctcaccaacccttcatcctcctcctccctccagcaaaggccttcaacaggatctctatccccagctcagactcgcttctcctagacagacttctccgcagaagcttctcatcgagagggccgaacgacagctttctcgctgctctgcgcgccgcgcgatacgcccacgcgcgacttcgtcctccttccttcctcccctccttcgtcctcttccgcctcgacctccctccctcaccatggtccttaacctgcattccgactttgacgtgattgtcatcggcgccggtattgctggatcgtgtgtaccttctcagccatcgaaggaggagagctggcctggctgacttgtgcttgctacttgtccctttgcgcgtggctccaccctctgttgcttgctccctctccgcccgccttctcggtcgcgtacctcagtgccctcggcttctccctcgctcagtccggccggcgcgtgctagtcctcgaacgcgaccttgcgacgcccgaccggattgtcggcgagcttctccaaccgggtgggtgcgcgagcctgcgcgcgctgggcatgggcgactgcctcgacgggatcgatgctgtaccgacccttggctactgcacaagggtgcgtctctctgtgtactcttacacctgacactactgacatgtgccctgctgcgtcattcagtatgagggcgacgaggtcgagattccgtatccaccggcaccggcgggccagggctccggcgaaggccagacggcgagcggccgggtcgagggtcgcgccttcgtccacggcaagttcgtcgatgctctcaggaagaaggcggcaagtgcgcccaactgtctgctcgttgagggcaccgtcaaggatctcgtctcgtgcgacaactcgacgcgggtcatcggtgtcgtcgccgcactcaagccgtcggcggccaatccgacgccggcaccgacaacgacgctctatgccccgcttaccatcatcgccgacggctgcttttcgcgtttccggcccgacaacgcgccgacaccggtcacgcgctcgcactttgtcggcctcgtcctcgaggacgccgagctgcccgtcccaaagcacggcaacgtcgtcctcggttcgcagcacgggccggtcctgctctaccagatcggcacgcacgagactcggatgcttgtcgatgtcaagggcaagctgccttcgatcggcgacggctcgcttctccggcacctcgagggcctcgtcccgcacctgccgccttcgctccggccgagcgtgacggcctcgctcgagcggagccagcgcgaaggcggcacccatcgtctgcggacgatgcccaactcgtggttgccagcaaggcagcagggcgcgcccggccagcgcgagggcgtcatcgtcgtcggcgacgcttggaacatgcggcaccctctaactggtggcggcatgtcggtcgcgctcgccgacgtcggccatctcgttcggatcctcgcgtcgagcaaggccctgcctgacctcgaggactgggaagcttacgccggccagattgcgagctggcattggtcgcgcaagaagctggcctcggtcgtcaacgtcctgagcgtcgccctctatgacctcttcggcgcaaagggtgcgtccttgcgttctccctctttcactcttctttcgccgcctgctgaccttctttttctcgcgccgacagatgagaatctctccgtcctccgcgaaggctgcttcaagtacttccagctcggcgggaccgccctctcaggccccgtctcgctcctctcggccctcgcgcctaagccgctcctgctcgcctaccactttttctttgtcgccttctactccatctggtgcatgttcttccacccgcggccggtctacgcccgtgagtcttctcgacctcttccacccttcacgagccatacgctgactccgctcaccgctctcctgcagagggcgacatcgagaagcccgcctcggaaggccgcaagattgtccgctggacaaagccttcgccgctcgagtacccggccttgacgatcaaggcgttcatggtcgtgcgtccgcctcggccctcattttccccgaccccgctcctcgctgacatgtttcctccttacctgtatcacagttcgccaccgcctgccaggtattcctgccgctcgtctgggacgagatccagtagaggaggggcgtcaccgctctgcttgctcccatcgcctctcttattccttcgacgaccccccttatttgctgccaacggcagccttgactagatcttacgatacggatgacactcttgcttttttgcaactgcctcggtcgtgggtttcgttgtgcgaggagcagctgcgacctctgacggcagccgatttgaacggtcggccgacgaccgggatgggctggccggcgacggtcgaacgggaagcggcggcccggacgacgacgacagccggagtgaacggcatcgccagcaggagcaggggcactggcagagcgagcaagaggaggcaacaagggtctaagagggtccgagaaggtcgagcacaagcgttctggcaggcgtcgtcgagggacgggctcgagagcggcggcgaccggcgaaggcgagcagggagagccgccttgctcctgttgctccgaacgatcactctctttctctagcctggcctggcctggtcaggcatcttgccgagctcatacgttgacggtctcggtctgccagaggcctctgcgctctcgtcgctcgagtcgccgtcgtccaggcggcctcctccctttgaacgcagcgcgacgtgcctgtcttcgtgcgagggcgagcgatgctttgcgggaggggatgggtgggagaagaaagaggaggaagggcgcgccggcccttcggctccttcttatgaggcgcaagtcttgaacatggcctcgagctcgcggctgcggcggacaaagtcctggttccagaagcccggcaggcggagcatctggatgaaggtgacgaggacgccccacgggtgcggccgggcgacgaccacgcgctcaagcaggacgcgggcgatgatctcggcaagcggcgcggcagggccgccggcgacggccgagccggtcgtcgtgccgaacaggtgcaggagcaggtgcgcaaaccagtgcgtgtgggccgacgggtgccgcaggttgttgacgattgacgacatcaggtggtactggcctgtggttcggaaagacgtaagtcggtcagcgaatgatgtacgagcaggcaaagcgggacccgggaccaaccctcgttgtcgagctgggcggcgatgcgctcaaaggcgacgaccgacggccgctgggcctcaaacgtccagtcggtcttgacgccaccgggcgagagcatcaggtagtcgacggcgtgaacgccgagcgagaggacagcggcattgaggaatggcaggttgtagcggacctggccatcgctgccggtgccggcaatcttcttcaccgcctcggggacgtggacgtcgagcatctccgacatgtaggcgatgtggtcaaagccctcgtccatgccggcgccgaggattgagacgtagtcggacgcgaccgtcgggacgagcagcttgtgcgcgtcggcgagagcaaagtcgtaggcgaccgggtccggcagcgtcgtgttgcgcgggaaggccgagaggacgacgttgcggatctgcgtgcagtgcggcgggagcgcctcgacgagcgacaggtagaattcggcgaggaagtcgggaaagtcgtgcaggaggacaagcaggatgcgcattgtccccttgtagagcgcgcgcgacgagtcctggagcttcggcgagctcaggaacgggccgaggaatttgaagagcgcgatgagcaggctgtggtactcgggccagttctgtgaagcagcgatagtagtcagcactcgggactcgaggagggcgaggactctcggaacagaccttatccttgttggacgcgagcagcttgggcatgaagagccggtgcgagatgagcgacatccacgagaaggtgaagcccgggaggagcgtcggctggagcattgagagcgtgttgctgctgaaggcccgcaggcagccggcataggcggtccgaatgctcggctcgatcgagtggaggtcgttgagaatcgacgagaaaaagcggaagaagggccgctggtcaaactcggcgccgagctcctcgtgcgagcggacgaggacgagaacgacgatcgacagaatcttgttgaggtagcggatctttgactcgtcgacctcggccccgttcgggtcgccgtaattcttgagcaggaggatgaagatcttggagagggcgtccattgggatcaaggccgcaaccgggtcggcgaccttgagcttggcatagccctcgacggcaacctcggcgcaaacgcggaagaagaggaacgtaacctcatctcccttaaggatgccctgcgcctggaggttggtgacgatgctgacgaacgcctgctcggccgacggcgcctgctggaagagccggacccactcgaggaagtaaaaggcgagccggtcacggagcgcgacctcgctctcgactgcctgctgctgaccgggcgcctgggcgccgccggcgatgtcctcaagcaggcggatgacactgcagcgagcgaggggcaaggggtggtcagtctcaggaggatgaccttcaatccagagcgcgaacgcacctatccgacaccttgccgacctgggcagcccgggcgagggcctcaagcgagttggagagctgggcgcgggtcgcgcacggctgctcgctgaggaggcactcgcggacgaagctcgccgtaaagttgatggcggccggccggaggtcgcgcaggacaaagtgcgcgagctggacgtcctgctcgaccatgctgatgaggccggcccggacgagggcgacggtgacgggcacgttgaacttccgctcgtcctcggcgtagatgagccagttgacgacctctttctggacctttgggaagagctcgcagagccgctggaggacgaggacaaagacctcgcgaccgagcgccgagtcggtcttgtagaggagctggacgaccttctgcgagaaaccgagcgccgtctcgtcgcggttgtacgactgggcggcgatcacagggatctgccggatggccatcttgaggtcgtggtgctgaggcagcgtcgcgagactggcgacgccagactgcgaaatgtacttgtcgacctccgagatgatctgctggaatttgagcaggctctggtcgttgctcaggctcgtcggcgccgcggcggccgactcgagcatggcctcgctcgccggcgacggagtccggtagccgagcggcaaaccacgcaagcggtcaatgacgcccggccgctgtagtttgccgtcggcacctgcagcaagtgtagcgaaggatgaggtcagcaaactgggagcaaacaaggcggtcggtcgatagggaacgcaccgttgaggacgcccggccgggaccggggcgacttctgcttggcaaactcctcgtaaacctccatctgctgaggcagaagcccgttcggccggacgcggagcatgtcgggcaggatgttgatattgacgacgggctgcgtgccgtcccaaaaggcctggttgccgcccgactcgcggtggcgctggcggagctggaaagcggccgagagcgtctcgtcgacgtcgtagatggccttgtcctgggccgcgcgcttgatgaccgaggccgcgaggtcgaggttggcaccgacgacggcaacgaccgagtcgcctgggattgtcgcctcgttgaagccgttctgctgaaggagcgcgcggacgcttgtcgagatcgagctccggagcgggtccttggacgtcaccatggccaggttgcccgcgaggttctgcaccatcgcgtgtgcggcctttcgcatcttgctctcgtcgccctcggtcgcaaagtcctttgtgatgaggtcacgtgacgagatgccggcgatcgtgacgctccgctcgacgacggggacaacaatctcgcggatcgcgcgctcgatcgccgtgaagacgatgcgcttgagcgtcgcgttcgagttgaaagggatcgtctcgggcgggaagacgaggtaggccggcagatcggcaatgagctcgtcgaccttacggttgagcgcggcttgggcggcggcggcagcggcctcggtctggtagaccgagacggccgaccggccgggctctgcgccaacgaaaccgccggccatcgagagccgctcaagatcctgagtaagcgactggacgccgccaggcagctcggtcggccggtcgcggataaacgttgtcggtgtaatcttggcgaggtcgaggccgagcgtcttgcagagaacctcgatttcaaacttgaggttgagcttgagctcggccgtgtggtagagctcgacgagcagccggaggacggccatgagccaggggttcggcgggtggaaaacctttgaccgggcgcactgctcgagcaccttgcagacgaaggggatcgcgacaatgagccgcttggcgtcgtagccctcgacgaggaggtctttgagcgagagctggttgaacttgagcgggaggtcgcgcgcgagcgtgagccggccgagccacgagccgaggttcttgagcgtcgcccggtcctgggcctgcgagaccgtcttttcagagttgaggagggtgtacgtcttcgagtacgtctcgtagaggacgtgccgctcaaaggcgtcgcggtcgagcgcctcgataaactgcatgtacagcgcgtggttgttgggctcgaccgagacgcgtgaaccgataaagtagtgggcaaaccagcgcgagtggcgcgcctggaaggcctccttcatgtcgtcgaccttggcctcaaaattgctcggcgcgaggttgttgacgataaagaggatccggtccgacgtgtcctcgtcgggctcttcgaccggctcggtcgtgtcaaacgtgtcgagccggagggccttgaaaattgggacgataacctggccgtcggcaccgatgtggcccttggctcgctcggcgtcgcggtcggctagcgtcgtccggacaaactcgatcaggtgcgggtgcgactcgtgcaggtgcggaattgcgacgacggcgtcgcacacgtccggaaactcggcgagccgcgactggaacgcctggagggcgatgaagccaaagtcgaacgacgacgcgggcgcgtcggccggcgaccggagcgactcggtcacgtagcgaagtgagaccgtgagcggcaacccttcgatgaggtgccggaagatgagggcgccaaagagctggccggtcagggcgagctgccgaggcgggtacgtgtggaaaaacttgtgctcgtcgagcagcgtgtagagcatgcaggcaaagatgcgctgccgctggctgtcggccgactcgcgccaggcagcgaggtaggtgacgaccgtctcgaccggcacgctgtcggcgtcgtcgtacatgcgccggtaaatgccgtcgacctcgctctcggtctcctcggagaaggcgacgacttcaaagccgtgctcggcgtccgagccgggcacgaggttgagcagccgcgggtagagctgaagcgcccggagccggaggtcggcgagcgtcgccttctgagagtccgacagcgcgctctgcgtcaggacgcggaggaacgtgccgacgaccggggctgagagcgcgatcgtcgtcgcatcggcatcggcctcctgccggacgagctcgctgttgatcttgtggccgaggaagtcgagcataggaccgaggaactcgtcgtcgttggccgagatcgagtcctcgaggtactgcaagaggacagaggcaagggtcaattgagttctcagagcggccggtccatgacgaggtcgcacctgctcgaggttgacggtctccgacttggccgccagagccgcgacgtcgagcgcaaacgcaaacggcttgcggctgaggagcgagccaaaggcgccgaccatctcagcgatgtcgacgatgccctggaggttcatctcgctcgcctcgtagacgcggctgaagtactcgcgcaggacgtccggctccgtctgccagagccgggtaaagaggacggcgttctgcgtgtggtgagcgaagaacatgtcgaggaggcgcgagaggatggctgcgtggacgggcgagtagggcttctgcaggtcggagaaggagtgaaaggtcagcgacttgggtggggcgggacagactgagctcggtgacgcaccgccgtctggacgaggccgagaaagatgagctcgagccgggtctgcatgccgccctcgagaatctcctggctccgctcgcggatgcgctcttcctggtgctcgctcgctcgccgcatcaggtcgtagacggccttgatgttccagccgctgccgacccaagcggggctgacgtctggcacgtcgtccggcgtgactaccttgtcgaggccggggatgatggcgagcgagaacgtctcctgcggaagcgacagcagaagctcggtgatctggaggacgatgagcggatgcgagctgtagtagctcgagccgggcgcaaagaaggccgagatcggggccgagggcgtctgcggcggcaaggcgaggagcgagagcaggagcgggaggaccgcgggcacaagcaagatgtgcgggtgcggagtgatgccgaacgagccaatgattgacgcccagtcaatctggttgtcggcatcctgctgtaggcgaggcgaggatggttgtcgaggctcgtcagcgtcaggcattctgatgagcggaaagcattaaaagacgtacgaggctgataagcgcgcgaacgacagccccggcgtcgacgccgccgagctcgccctgagcgagaacctcggccaggccgacgatgaggctccgacccttctcttggaggccgtcgacgccgccccaccagcgaccgaggagcgcccgcagcgcctggacgtcggccgtaccctggccgagctcgcacaagaactcgggcaggctgacgcccgagagcgggagcgggagcgagttgatggtcgagccgaggaagccggcgctaaacttggccgtcatcgccatgaggagcgtccggcgctgctcgccgtcgagcagcgggaccgtcgccgtcgagagcagcgtcgagagcagcagcgtgcccatgcccgggctcaggtccgtctcctcgtcaaaccagccgccctggccggcccggagcgagtccatgcttgcctggaagttctcctggacgagctgccggccctggtcaagaatccggctcaggacgccgaccgcgccgggcgtcaggaggcccgcaccgagcgtcagccgctccgaaggcgagagcgagacccggttggcaaagtgagtgaacgagaaggtccggaagagctcgctcggctcggccttggcgatcgcctgcgcaaactggctccctgtagaggggcgagcggtaggcgaggcaagtcacatcagcaagccgcatcgtcaagccgcctgagcaagaggcagacgtaccaagtaggacgtcgcgggcgacccgcttgccctcgagcaccatcagccgccagaccatgttgccgccgctcggaacgggcccgttggagctcgcgttgagcgtcgctgcattggcattgacgagccggcggaggaagtagtgataaatttcgggaccgtggtggtccgagagctggcagcacgagtcggatggcaccagagctgtcagcgagtggactcgaggcgtgaagaaggagggaggatgggcgacgagggcccggacgctcgcgcgccctgccgcgcaggaaaacggagcggagaggacgacgacggacctggcggatgtcgttgacgcgcgagctgaagctgtcttcgttgatgctacttagcaggaagacaatctgggccttgacgatcgtgacgagcgagttgccgttcttctcgtccttgctggcctgctcgagcggcggagcagcgggcgcgatgcccggcggcggcccagccggcggcggcagcgagctcaggcccggcgggggcgcgagccctggcgggagggccaggttcggaggcggaggaggatgggaggacgggttctgcatcgatgggaggagaagatcaccgacgagagctggccattagccgagggagggggcgctggcgagggcgactggcagggttttccgaggtcgcaggcgagagagggtgcgattgagatccgagcgtcagactcgtctgctgggcgacgacggacgagcgcgcgttggccggatggggtggctgggcgacgaagcgaagtctgatgagtccctcttgcttgtcgtgtcgtgggtgttttagggtatccaaaggcgaaggaggaagggcgatctacaggtggtagcggagcaaggagagacggccagcagctcggcaggcgcacgagtcgttgcgcgcgcggcgccgaagcgaaagcacccgcaagcgagcgacatgtcgctcgtcttcagacggcgaagacggcaggaggcctgctgagaaatgccgctgaatggacagcatgacggggtcctcgatgaccaaggaggatgtgcagagcccttgctgactggtcttcttgtatcctcgaggggatgcctcgtcgtagtaccgctgacgtctctgcccagcacggtctcaccctgctaaatcgccctgcttcgctctctgccagtgccgctctttcgctcgctctctacaaacaatccggagcgtgcctgtcggtgggctatcaggttcgatgcaaggcagcagcacaagtggctgaccgagaattggacaaccgccagctgtcgccctgcccaatcgacaacgatgcattctcaacgactcaaaccactccatctcactgaggcagacggaagacctgtcgaacgctcgaaggctgtatcttcatatgctcatctagtcagaaagagccaactcggccgtctacttgtcgctgaccagcgcgagcagcgactcccgaacggtcgttgttggcggggccaggtcgtgaatggcctggtgcgtcggctcgacctcagcgaggctcgccttgccctcgacgatcattgcgaccgcccgatcaagcgacgggatgaccttttctggcatgcccgcggcccggaagtcggcgttgccgaacgcgacgtcggtcaccttgccgccggtcagacgctcaatctcggcgacgagctcattgcccgtcacgtcggccgggccgttgatcacgtacttttggctcgcgtgggccgaagggtcggcgaggaggaggagcttgccggcgatcctgccaacgtcgttcgggtcaatccacgcgcccggtaggtcgcccgacagcatcagccgcaacgggccgaacgagcccttctcgcggtacatcttgacggcctcggctgcaggctcgaccatctgggccgaaaagacggtcggccggagcgacgtccacttaagcgcgtcaaatgccggcgtctcgagcatcgtctcgatcgcccagtgcgaccggccgtagaagatggggctggccgggccgatgtagggcgcccaggtcgaaatccggacgacgtaccggacgccagccccgaggcaagccgtgtagaagagcgactcgtcggtgaactggctgtcgcttggcgtgacggcgacgaaggctttgacgacgttctccgccttgagccagtcggcgtcgatctcgggccaaaatttgctgccgacgtcgacaagagggagcttcttgagctctttggccggcgcgctgtcgaccgaccgggtaagcgcgaggatgcggacgtcctggccggcgaggtcagccgacagggttcggaccgtgctacgaccggtgttgccggttgcgccgatcacaaggaacgtgcgaggggcggcagtcattctacggcggacgaaggtatatacagtcagtgggccggatgaaagggaacattaatctcgagcgacgcactcggggtaagctggacggtggggtcggtggcgggcgggaggacgaagcgagacggaggaagggtggtgcgggcagggagtgaggggtgatgttgaagaaggactgggtcggaggggtcaactgtcggtctttatggaagcgagccgctccaattgagctatggcgttgacgctgcgcccaggggagccagcagtcagcaggaggctctgcggtgagtcgggttagtaaccggcttcccagccgccgccgacccaccgcacgaccggaggccggcgactgctcgacgtcaagccatcagcgaggatgagtggatcgaagtatgacgtcgaaggccagagcgaacgacggcggcagcggcgggcaagaggcagggcaagacccttagtaggtgccggcggcagggggctgctggccggggacgacgccacccgcggccgcgggcgggacgctccgggcctgctcgatctgggccgagcgggcgatctggcgagtcaaggagtggataagaccagttcgacaagtcagctcaagaacgagagcagggagtacgagacaggaacgcacctcgccctcgcggtgctggcgctcggcctgctcgagtgcggccttcttggcggcaatctcctgctccagcttgttgtgctctgcggcggtgagggtgggcagacgagcaaagtcagcgctcatttcgagcgtccactccttacggctgaccggactcactctcgtgcgcgagctggaggtcgttctcggccttcttctgctcgttgagaactttgttgtgcttggcctcggcgtccgacagcttctgggcggccttggtctcggccttcatagccttctcacgtgagtgctcgaccttgtgctcgtgcttctcgccttttgcgaggtccttctcggccgcggcaagcgccttctcggcgtgctagaagcacgatgggagttggttgaacgaggcgtcagcgaagccttcttctagcggagcaaggcagtcgcgtccacgacctggcctgacccaggccagtcgcgagtggcagacgctagacgtaccttgagctcagacgtctcgcgcttctcctgcaagttgcgcgaacggtcgaggagggagagagggacgcataagcttccggacgaacgggctgagaagcaagggagatgggcagcgccgcaggaggactgacctccttcttggcagacttctcaagggcagacagggacgacatggtgtgctttgtgggtggggggtgttgggggtggaggctgtgaatgtgagaggggcgaatgaaggtggtggtcggaggggaagggctgctggtggaagcaacgaagcaccgtctcagccgcgagacgaaatcgatgacgacggtccagagggcgatcgaaagaccgtccctccgctcggcctggactaattaacagtcgctcatgctcgaaggcggacggcatgcacggcgcggtgcagtcatctctgggcagatgccctaacgagtcgcgaaggaaacgagatgcatgttatccgccgcaggcgaccatcgagccaggctagcgcgcacgtccggagccgccacaaaccgcccgcctcgttaaaccgcgttagccgcatgcaacgacgggcagcagcgagtcggccgacgccgacagcagcgagatccaacgacgagaaagcatgacgagtgcagagaactggcagtaggacggcacccgtgtgcacgagccgaccgtaagccttcgccgccaattagtcgtcgtcctcgtccatcttcgggacatcctttgcgctccagtcgagccacgagcccgagtagttgcggatgctgcgtaagagggccgagggagttgacggacgatcagcttactcgtgccctctcgtcgttcgtgaggctgcgacttgacgcacttggtgaacttgtcgcgcggcggcaggctctccatctgctccttggccgaagcgctccgcttgcccgagcggcagtagacgacgatcggctggtccggcgccggcttggcaaacgtaaactccttctcaaactcggcggcgtccatcttgagggcctcggtcagtcgggagagcggcagtgggagtgacgaggggatgttgccctggaggatctcctcgcgctcgcggacgtcgatgatgtaggccttctacaaagcgcacagggatcggtcagcctaggaaaccactagagagctgacggcggcagtcagccggcggagagccgaccgaccgccctgccagcgagcagcactaagatgaagggagacgacaaacgcacgccgggcgtctgcgtgagctccttgacctcgtcgtaggagatcgggcccttgtcggcaaagtcggtccgccgggtgacgtcgatcgagtagagtctgagcgagccgacggcggcagcaggcgagggccgacggatggccgtctggctcgaggcggcggtcgcccggaaggcagtcaccgacgccatcaaggcggcgggcgcaaccaacgacgacgtcgccgagagagccgactggcgggcgaggtagcggacgagcgtctggcggagcatactgggtaggttggcgtagggtggaaagagagaagggagggtgatggaggagaggaggaaaggcgtgatggcgcgggcgagctcttcggtcagccgagcagcaggccgcagcgcagcgcagccctagacctcgtcaggtcgccctccctggctcactcataaggaggctcgggtcggaccagtgacagtctcgcatgcacgccgtcgcatgtgatgtacctcgtttcagggattggaggggaaggacctccttccagcggggagccctatccctgcgtcgcaccgcctgtcgccgcggttgctggcgcgcgctgaatggtgtcggccgcgtcgccccacactccgaccagacctgttctccgacatccctctctctctctctctctctgcagacaggatagcttgaggcctgcgtgtgcaagagacgacgctgagagtcaccgcttggtacgtcgacctgagccagacatccctgagacgacgctcgcgctgacctctcagctctccgccctcccagctccctctccgctcggcaacctccctcgagttccctagctgtcccgctcgccatgctgtcctcttccgtctgcctctctagagcactcggtagccttgcaaagggcaagggccgggcagtggccggtcagccggtcagtcgttcctgcagccgcgtcggcaggcacctcggtcaaggctacgctgctgacctcctcgaccttgccctacctgctctcacagtctttctggtcggcaccggggccgtcgcgcgcgttctcttcgacctcaagattgcagagtcgctggccgccgtcaccggcatcggacgcgcctcgtcctcaagctaagacggcgactcgccagaccgagtcggccggaacgacatttgtagagcccgaatacgccgagcccgagcccgcagcgtcgaccgagtcgccgtcaaggctcgacagcgatacgccgctcccttcatggcctggctcggaagggagcttacctggcggtcagcgcaaggcttcgccaggcgcctttggtcagcgcgtcgtgattgaggacccccggcagctgtacaagggcccggtcgagcgggccgagctgcaagtgccgctctcgcacccgcccgagcatccatttcactttctaccgatgaaggacaagctcaggctcgaccgcaaccgcgaggtcaagctgccgaccttccccgaaccgatcaagatcccggcctacccccagcccatcttcaagccgtctgagcctgccgaggctgacgccgaccctgacgcgccaccgacgcttcgctatcgcgacctgccgccagagaacctcgtcgagctctaccgcgagcggatcgctgcccggccaaagacggaccggccgaacacgttcctccagcggatgactgacacgatgctggccgatcccgacgacccaaagggctggtggcttgtccgcgagaagatgggcctcccgccggataatgcgagccggccggccgccgtcctctggtactgggagagtctgactgagggccagctctggaagctcattatgcccctcttctacttctgggcggccttcccgatcgtcggcgccagtctcttctttgcctacattacctgggtgcgtttgctgcgtcgcagagcgctcagctgtcccaggccgacctttgctgactcacctctctctctcgtggacaggacggctactttatcgaccccgaggacggcagctggcagtggaccggccggaactgggaccgcaactggaccctcaactgggagaacctcacgctccggcgcgacctcaccaagtttgaccgaccgccgatcgttaagttttgaacgagcgcggcctgatgagaatgacagccttttccctagtccgcaccctcgcgggaacagtgctgaggcggcagcgacgatgcaagcaagggctcatgggttgtccgacgtcttgtgactgcgccagctttccagcccccagatgccctcaaggagatcctcgtggaccataaacgttttgacgacctggccctcctccttctcgccgtcaaaccgtccaaggatctttccgtgcttgtcctcggtctgggcgacgatgtccggataagggatggtcggcggcgactcgagcggccggagctgccacgtcgacagcggccgggtcgactcgtgcaggaagagcggcgtcgtcagggtcgtgtagcgctgcaaagagggggtgagctgtcgtcagctttcgagtcgaggcggcgcaagagcgcaagggcagaatgcgggacggacaggctggagcagcgtcgtgtacgtgagcagccggatcgccgggttcgggtactcgtccgtcggcggctctagtatctcgatcgtgctgacgtacggggccgaacaccagccgatcatggccgtcgagagaacggtcgtctgggcgtcggcgggaacggccgagcgagatcagtcatgagcgtctggcgttcaagaggaagcaaaggctcaccgaaatggcgcagccggcaaggaagcagcgtccgacgaggccgagcggggcgtcaagaatgaagataaagggcgagagggacgtcgagaagacgagcgaggtcagggagaagcccctgcgttgcgcgcaccatcgtcagccttaaagcgagtgaccgcacaccaacgcatggactcacttgaggaagcggaacgccttggagacggggccgacgtagatgacggccggatagttggaagctgccgggctggccctcgcatggacgaacgcgtcggcggcggcctccggagcagcacccgaagccgaggactctgccactggctcagcgtcctcgatctctggcctggaagggttggtcgcgtaggagcggagcgaccccgtggcccagatgggcgagcagcgagggctgactccgcgctgagagcagccggcgagcagcgactggcgctggctggtggggaggacgagccgcgtgcggacaagcgcgccgaccggtgacgcctgggaggcggccgaacgaaggaccaacatggagccgaagagagctggtgcttcctgctgcggtccgtaagcgtatgtgggagagagagagagagagagagagagagagagggagagagagagagagagagagagagagagagagactgctggcaggcgattgaggcggcgacggtgggttgctgtcggtagccaggctcttgctccgctcgctcgtcgagcttcgtcgaacttgtcaagcgaccgccgggcacccgacctcgacgatccttccagcccccaacatctcgccaggagttggttggcctgcagccaggtgatcccacccaggagcatcctcgatactctcgaagagtgccctcgcctattacgaggccctcgccgcgatctctcggcacgccgccggccctgtcccccgcagcagaccacccggccgacctcgacccacgcgacccggcctcatcccctcccgctggctgccatccatcagcgagtcagctcgtccagtcttctctcaattgcctgcagagccgtaagcgatggccggccctctgcctggccctttcatgcgacacaacactgccccgacctcggcctttgcgacaccaacccggccggccggctcacccgcgccgacaacacccgcagctctcgacggcccaccgccgccaccgccagacagcgcaactcgtcacccaagcatccatctcccttcggatggcgaggcgggcggaggggtcctcgagcggcacctccgggcgtgcttcctcgccggctcgtgcgccgacgtccggatccgggtcggccgctggcgtcgctcgtacgacgtccataaggtcgtcctcatccaggcggtatgagtctttcgctcatcggtcacgtcgcgctgtctggcaccggctgatatacatcctgaccctggcaggactactttgcggcgatgttctgcggcggctttgctgaggacgagcagggcgagctcggccgcgcagcagcggtcggcggtggcccggtcctcgtcgaccagcgccagagctggactcagacgggcgagcgcgaggtcgaaattcacatcgaagaccccaacatctcgcgggcagcgttcgagtgcgtactcttacagcggcgtctctcagtcgtgccgtctgctaacccgctcgacgtgccttggcaggatcctactcgcccggctctactcgaccgggccagctctccatttttcggccgctactcatccgacagcccagagcccgctctcgcctgccttccccttcttgacggcatccagcttccccgcccctgctggcacccagctggcaacgccgcgcttcctcctctccttgctggcgacctcgatcttcctcggcctctccggcgttactcaatcggtcctccacctcatcctcggcaacgtcagcccttggagtgtcggagtctacctcggctttgcaatcggccgcggcatcggcagctatgccggcgaggactgggaagatcgcgaggagccaggccgaggcgcagtcggcctcgagacgctcggcaaggtgacaaagtcccctcgcctggcaccgctccgccccgttcggagcaacagtgccgcgtccagcagccagcagggcatcaaaacggcgaccatgactccgactgcatccccggccagccgacactcggcctggacgccagccggcgacccatcgacgccgcgccccgcatcgcccgccctgtcagccaagtcggcctcgtcgtcgtcgtcgcttgagtcgcacctgatcagatcgttgcactcgttcgccgaaccagaggccgccttctattacggcgtcccctcggccaggatcggcgaggcttgcgcggcctggctctgcaagtggggcgcggacgtcctcgacgtcgaggagcgtacgcacgccgtctcggtcatgggcgtcgaggagcgctttaacagcatgcagatcggccgcaagcctgggctgaccgaagcccagtcacgcgactcggcaaggccagactctcccttcgcctctgtgccaatcgttttccccccactgttctcgctcggcggcttgccagcaacgtggctgcgcgccgtcatctcgtctgacgccttctttgtcggcagcgagctcgagcgctacaaggtcgcccggcgcgtttacgagcttcggcggacacagcgcgaggcgcagaaacttgagcaaggccgaagcctatcggacgaggccgaccgtgacgatgaggaggaagaggaggaagaggcattcgaaggtcagtcgcttgcgatgcttcttgttgggtgagcagcgcttactctgcctcgcctctcctcgtctcaggtctcttcgcaactggctgcctctactcgcacctcgcgttcgaagacctggcctacatcagctctgacttgaatccgtcgagcgggacgccctatgccccgttgtccgttctccagacgagcctctggcaacaccaggagctcaagtcgcgcattcagacggtctcgcaagccgccggcccgctctcgcccggcagcgcatccagcgcaagttccgcagagggtaccgaggagctgggcatcgccatttcggccagcggggtcgccagtcgcatcgagcgggcgagccaaaaggagcaccgccgtcagcggcggcgcagtcgcagcttcagccggctctccgtcgctagcggcagcgccccatcgaccccggcgtcggcagccgagaagggcaaacagaggcaaagccggctggagcctatcccaattcctccatcgtcgacctcgccactgggcgacgtcggtggcttcgtcggcggcgagctggcggcgctctcttgcaagcgctactggcccgtgccctcggacgacacgtgccggctcggcgcctggggcggtttcgtcgacgccgacgtcttgcgctcatctgcggccgacgccgctttcgctagcaatggactctcgtttacgacggacggcgccgctgtcgcgtcagcagcggcaaccgcttccactggtgcctcgggcgaggacgacttcttcggcatcggctcgagcgctttatcaggtgccgagatcgccgccagcctgcagcgcgcatccccggaggagccggacacatcgtacaccgactacgagccgtatcgcttcggcgtcgtcttccacgacattgagcgcctcaaggagaagcagaggctttactccgagacgcgagcctacgccggtgagcagcgcgccctcgtaccctaacattccgtcctgcagctgctgacgcgcttcatccttcgcaggcaaccttttcaactgctatattcagcagatccggcgcaaggatcggagccttcaggtgagcgaacggctttgccctaatcatctcagcgtggctgacgaacgctttgtgcacctgcagctcggcctgtacctccaccgccaaagccccaacgagcccatccctccagcttcagcgcctccgcagctgggcaggcccgggaccggcggcccccaggactcgacgggcgcgtcgtacggcgcaggctcgggcgttctcttcgagcccgcgtcgttttcgtcgtcggccagcggctcgtccttcctggcgacgtctccggtgccagtcatccactcgttcgcctcgatgcaccctcatgcggccggctcagctccatcggcctcgcgtcggctccagacggcaaacctctcggccgctgccgctgcacctgccgttcgagggccggcactgaccttccgggacgagcgacggagcgtcaagctctggttttcaatcacggcctgctcaagcctcggcaccgccttgacgcgcttctcgtcgacgcccgaggtcttcgcggcccagcagtcttacggctggcgcagctcgagcctccggaccgaggaatacatctcgccggccgagggcttcgtgcccgaggaggacacactcgtttggagcggccagctcgatgaggaccggctcaagtgcttgcgcgcgacggtgagtactcgagcgtcaccggcgacactctcctctgcgttcggctcacctgtgccccttctgcctgtgtcgccaggtcgtcctcggtctcgtctgatactttaagccgcctgtgtcggcactaccggccgccggatagtggctgcacggggccagttggcgtgcactgccaagcgttgttctcgatccggggaagccggcgggcgatctgctctttgaggcacgagcctcagttacgcctgctcgctcgctctgcccggcaggctcaatgagggcgggaggggtcgacgcgtcgagtcttccgtgcgagccagtcaaagcgggcgagggcgagggcagtcggagaggccgtcgacacccatcctgccctgcccccctctgccctctaccgtcagcctcccctatcttgccgaagccttccttttgtgagcacttcaccgtcagccgctctcactcgtccttcgctgagcctgaccgtctgcttcacaacccgctagcagcccaccgtgcaatatggccccgaccccctccttccgccgcgtctcctcctccacctcgtccacgccccaagtcgacgtcgagaaggcggtcgccgactcgacgccgctcctgccaggcccgagccgagcgttcgagaagaaggaaggccgatctggctctctttcagttaagtgcgacgaggcgtgctgcgaagttcgaccttgcgctgcgtgccggaagcgggccgacacttgcacttgtacgtcagccgcttcctaacccctccagtcatcgtgctgacccgctcgttccgaacctcacctccagtcattaagctcgtcctcgccttcgccgcctgggagtcgctcgctgtcctcctcatctgctggacgcaccccaaagccgggctcgttgtcatgcttgcgcccttcgcggtcggcgccgccctctacgagcgggtctttgcattctgcgatcggctatagagcggggcgcaggcgattgagatgagacttcatggcggattgatgcctctccttaggttcgacggggacgcagacagagtgacaagggaaagcgaaaggtgaatcattattcgttcgtgcacatatgtacgagtcgagaaaagtcgtcgagccctaccgcccctcgcccgctaaccacccgtacgtccctcgtctgagaccgcctcacttcttgacgtagctcggcggcggcgcctgagcggcgtacgcctgctgctgctgctgctggccctcccaaggctcacggccggtcgcgtagccgggtccgggcggaggaggcgccgatgtcgcgccgtacgacggctggtgctgctgcggctggtgctggtgggggtgtcctggatgagccggctgggcctgctgttgcacgggcgaaaggacgaatgtcagcaagggttgaataagtataagagaactgaagcggacggacgccggcgtaaacgtagcctgctcgctcgttgacctgggcctgcttgtagatgaggctgagcagggagggacgaagcgcagacgtcagcatctgcctccggccgagacggcaacagaagtgaaaggaatgcactagagggcgtggatacagcccgggaagaaggcgaggattgtgaggaggaggttgatgcagaagtcggctccgcagccagagaggattagcgggacggccggcgggaagaagatggcgaggatgacgaggatcactgggcgggcgcgggcgaggcggagaaggagggtcggcagggtcaaccacgggtcggacgaagcgttgctagcacgagggcgtacaagaagagacggggtcgttgccctgaccagggtggttgttgtaacggccggccatggtgggggtggtgggggcgaggcggcgaggcggagggagctgcggggctaagcggcgaaagaccgaggtggcggtcgaaaagcggcttctcggatagaggtgctagtagctagggtgcgagcttgagctgctgctgtcgttcgtgctggagggactgtatgtgtcgttgttgagggcggatggtggttggcaggaggagagaagcgaagggcaggccaagcgaagaagggtcaagaggaggcgctgccgctgaggcctgcgcgtcaccgggctcggcgtaacaatcccgtaacaagccagtcacgctcgaatcacgccgtcaaatggaggccgcggcgcgtcgacggctcgtccgcagcgcgtcgtctcgtcgtccacaggaggtcaggcccgctcactcgaccagcaggcaacagcagcagccatggcagacagaccaggctcgccgcagacgacgctctccttggaagcggtcaacgcggtcgccggcccatcacgctcgcccgtcgatgacccgccaaaggcacacgaccctcctgcgccgcccgcgatggcccgctcgacgacgggcgacgacatcctcggcatcccgtccttgccggccggggatgagcccaacgagcaggacgtgcccgtcgaactcgacgttcccgaggactttgtcgaccgagccgacgactttgacatgcgcaccagcatgtacgtccgagcgtttgaaggtgcgtgccggcttggcccctctgctggtgcccctctttgcccgtgcgaccctccgtgccgcctcgtgctaagctgcccactctttgtcgcgctaatagacatgctcgagacggttctcgcaagcgaaagctaccttttctcggaggttgaactcgccaccttttcccgctaccgcgccctttcctgtgcgtctttcgccacctcgccgcaagccgcgcgcggtccgaccattcttccgcacctgagctgaccctgagccgctctagacaacgcacgttacctccttacccggctcatgctccgcaagcctcggctctatcggctcgtccacctcgagcggtcgtacgccggcgagctcggccggcacgtcacagccgcgatggacgagctgtgcgccgacccacggccggcccagggaccgagtctgccatcgctcaagacgacggctagtacgtcgtcgctcgaaaagagggagccgtcgcctataaaggtcgacgtcaagggcaagggacgcgagcgggtgccgacgcctccggcgacagagccatcgaagcgcaaggtcgaggaggacgtgattgaactgttgtcgtccgacgacgaaaccgatatcgagattgtctctgcctcgacttcgaccgcctcttcttcctcttcgaagcggaacggcacggcgacccgcctgcccccgccgaagactaagcgctcaatcttcccgacgccgcgcagtacgcccgcgcccttggatcccaaaggcaaaggcaaagcggtcgccctttcaggcccaccaccggcgccgccctcgctctcggccgacgtcgtccgagctctgtcgctcgacgacgtcccgctcgagctctcgtggttctgcgcgggggttgagcgcgaggacgaggagcggctgctgaggacgctccagatggacgagctgcgcgacgtcgccaggggaatgaagtgctggaaggcgggcgtctcggtcggtcctgttgcccctgttgctacctctgcctgaagctgatgtccgcgatcttgcaacttgcagtacgacctcctcgtcgagacgatcctcaaagccgctcgctcgcaaacgacgctctcattcgccgtcgtcgccccgaacgacgcgtcggcggccacggtcaagcagtcgacactcccgttcggcggcgcggcgcccgtccgcaaggccgacaccggccggggccggctcatcaaagtcgtgctcgacgtcatgggcaaggcgatcgtcgtcaacccggacgtccgcaagctctggggtcggctcaacctcatcttctaccgctcgtgcgtcggcgctcgctcattcctgacgcttcctagcacaagctgaccctgcttgacgggcttctcgaaaggacgatgacgccgccgacgctgctgctgccgcagatcctgaccaaggcccagaagcgcgtctacccgtcgtacaactacacgcggacgctctcgctcttcccctcgcgggccgccctgctcgcatacgaaaaggcgctcctgctcgagaccgaggtcgacgacgcacttggcgagcaggagacgctcaacggccgaaggccgttctcgaagaacggggagggcaaggcggcgtttgggagcgggcttgggcggagggagggcgcagaagtcgttcacgccatctgggagctcgtttggggccgctggaggacggtcgtcgctcaggcgcaggagggagggatggagcgcgaaggcgctcggaccgtcagcgaccgcttccagccgggtgagtccgctcttccttgttggcagcctgcgtagcgatcactgactctagcatccttcattcctttgattcaggccacgtcctgacccggatcgtctacaagggcgcttacgcgctgggcgtcctgcacgactacgatgaggagtgcgacgtcctgcgcgagctcctcgcccagaaggtttggcgccggggcaagcgggggtgagtggccctatgtcgtccccttccggcttcgcgcctgatagctgacaacctctgatcggtcggtcccccagggcttggtacgagcggcttgccctcatcctcatgacgcacaacaagggcccgcagcaggaggccaagcggcgcgaggcgctcgacgtctgcatcgacggcctcgaggacgacgacacgcacctcagtcggtccttccctctgcgtcccctccgtccgccttcactcactcgctagccgtccttgcttccgaccagtctaccggccctcgctcgcccggcggctcgctcggctcgaaaaccagctcaacctgccgtaccgcgagcgccacatctgcgacgggtcgctcactgaggccccgatcgtcacgctcagcgctacccgaatccgggctgtccaatcgggaggcgatgccgatgtcgacgacgaggaagactcgcctagcggcggcggcggcggctgggacggtggcgcgggccgcaagaaagcctttgagggcgcgacgtcgtggggcgcaaagagcgcttggttgggccgcgacggcgtcgaggtcggcgttgagcaaagggtgctcgagcagtgggaagatgagggctggaaagggtgagtcgagcaatgctctccatgttctacggtggcgcgctgacgacctcgcccgccctcgattgcgccagcttccatgccgaaggcagcatcgtcacgaccatcttcggcctgctcttctgggacgttttttttgccgacgttcctggcgtctttgagacgccctaccagagtgcgccgctcgacctcggcgaggacacgtttgcgctcggtgagtcgtcaggcatgcgctctgggatcgagactctctcgctgacgagaccgcttcgccagcccgatccgaactcgtcaagcagcgcctcgccgacatcgccgccggaaaggcgcccgcactcctcgccgaagtcgaggcccgcgagcgggacaagggcacgctctgcgttggcgtccgctgggagtttgacgccgacgacctgcgcgagattgtcgagtgtctcggcggcaagagcctcgaggtcgtctgtcggatgctgagcgaggagtatggccatcggagcagcggcgtgcccgaccttctgtgagttcgctctgctgcgagaagtcgactgtgcccttgtgctgactttgagctctctcatctgcagcgtctggaactacgaggagaagcgtgctcgcttcgtcgaggtcaagggtcctggcgaccggctctcttcgacccagcaggtgcgtctgcaatcgtcggtccctgccacgcacgtcaggactgacataccgtccgcgccctctttcaggtttggctcgacgtcctcattggcgcgggcgtagaggccgaggtctgcaaggtcgttgaggccggtaacgagggtctccggtcgatgagccggagcgtcagcccggtcaagcgtcggatgccgtcggtcgcaggaggaggcggcgcagagggggagagcgagtcgaccggcgagagcgaccgcggcggccggccggccaaaaagcgttgcccttgaggaacggccaccactgaaggacctgatcatgattgtctctctctctctctctctctctctctcatgacgcccgttcttccgtccctcctcttgagtcctacgattttcaggcacccctgcgcccgactggcctgtcgtcgagtcgctctcgcggggccccgttcttttctttgcgcgcgcgcgccctctcgcctcgaacggcgacctgtcgtcgctggctgcttccctccgcacccaccacgtccatcgcctgtcctctttctcctgctccccctgccctcgtccgccgccttctgcatgctccggaccgtctcacggatccgtctcaggctctcctcccgtcccaccaagattcagctctcggcgaccgttgcaaagcaccctcggacagccagcgccctcgccgtcggactcgtcgccgccgccctccacgcgcactcgccctcccttcagcaggccctctccggcccctggacccagctgcagcggcgtagcatgtcgatcagtcccgtgctctcctccctcgccagcggacggaccgaccaggccggctttgccgcgaccgccgtcggatcgagctcgaccgcccattcggactcggccgccgactggtcgtcggcgcagacggccggctcgagcctgccttacgccgtctacaccaagccgttcgaggtctcgccactcgacgaccggtcatacaggctcgtccggctgccgaacgggctcgaggccctgctcgtccaggacgagaagacggataaggccgccgccgccgtcgacgtcaaggtcggccacctgagcgacccgcgcgagctcgccggatgcgctcacctggtcgagcacatgaagttcctcggcaccaagaaggtgcggcttgagagcttagagcctttcgttcggcgatagggtgactgatgccctgtcgatcgcggccgatcgaactctacagtaccctaaggagaacgactactcggaggtgcgcgacggccgctcagccccgatggctgcgaaaccgttctgttccgcccgtgctgatcgagtcgtcctccgctgcagttcctctcggccaatggtggcagctcgaacgccttcaccggtgcgtgccttgtccgactctagtacccgtcgcgccaactagctgaccttcatcgtgcctgtcgaccccttgccaggcatggacaacacgaactacttgtgcgcctgttaccccctgctctcgacccacgtagccctcgctgacccttttacatccgcttgaactttttagcttcgacgtctcgcctggagcgctgcactctgcgctcgaccgcttctcccagttcttccactcgccgacgtttgacccgagctgcaccgagcgcgaactgcgggcggtcgactcggagcactcgaagaacctccaggtgcgtgtgttcccggctccaagcccgaagcttttgactaatctccctcttccttccttcagagcgacatgtggcgcatgttccaactcgagaagagcctgagccggcccgaccacgactactcgaagttcggcaccggtaactgggagacgctgcgcgaggaggtcgtccggcgcggcaaggacccgcgggccgagatgatggcctggtgggagaagaactacagcgcagagcgcatgaagctcgtcgttctcggcaagggtgagtgccttttgctcagcgtcttaccggagctgcacttgctgacattgtcctgtcttttagacgacctcgacacgctgaccgagtgggtcgtcgacctcttttcgcccgttgtctcaaaggacctcacgccggtctcgtttgcgcccgacccgtttggccccgagctcctcggctccttcacctacatgcggacggtcaaggacttcctcgcgctcgagctcgcctggccgatcgccgaccagactgagctttaccacacaaaggtgcgtctccttcgtagtctcgtgttttgcccgcaggcattgacacagtccgtctgctcgtctggtagcccgcgagctttgtcgcccactacctcggccacgagggccccggcagcctgctcagctttctcaaaaagaagggctgggtcaacggtctcggcgctggcgcgagtgaggcagcggccggcttctcgttctttcgcgtcaacctcgacctgacgccggagggctacggtacgttggctaccctgcgtgtttgcaagacgagatcctgatgcagatcgagcccgattcgatgtcacacagagaattacgaggccatcgtccaggccgtctttgcctaccttcgcctgcttgtggccgccccgtccgagacgcagtcccagacgtttgacgagtgtgcgacgctcgcctcgctctcattccagttcgccgagaagtcgtcctcgccggccgacgacgcgtcggacctcgcctcgcagctttcgggcccgtggccaaaggactggacgctctcgcagcagtacttgatgcgcgactttgacgagcgccaggtccgcgacgtcgttggtcgcctggccgacgtcgaccaggtcaagggcatgctcgccggccagaagctgccaaagagcatggccaaccggacatgggacaagaaggagaaggtctacgggaccgagtacctcgtcgagcgcttctccgaggacctcgtcaaggctgtgtgtccttgccatcttctgatgagcatcgtcgagtcagcctgctgaaccccctttgctccgcaggctaagtcggcgccgattccagccgagctcgccctgccgcggccgaacaattttattccgaaaaacgttgacgtcaagaaggtcgagggcgccgagcccaaggaggtcccggccctcattaccgacacgcccgtcagccagctctggtggaagaaggacgaccgcttctgggtcccgcgcgccaacttctgggtcggtatgcgctcgccgctgctcgatgcttcgccgctcaatgcagcgacggcccggctctttaccgacctcttccgcgacttcatgtcggaggagacgtatgcggccgagctcgccgggctcaaggtctcggtcatgtacagcggcggaaacatcatcctcagcacgagcggctacaacgaccggctcggcgtcctgatgaagacggccgtcgagaagctcaaggcgttcaagattgacccggagcgcttcgagctgctcaaggacgacgtgcgtagagacgaccgaggtcgcccgcgcccctccccccccggcccgccttgtgctgacgccctcctgtcacacctcaacagctcaagcgcgactggtcgaaccacgagctctcggaggtgagcacactccagcacccatgagatcgtctctgacgctggcgatcgctgactcttctcgccgcagccctacaactactcgaacttcttcggctactacctcgttgaggacaagatgtacccgccgaaggagaagctcgccgtctttgaccgtccgttccgtcgtcccgctcgcaagcttgacctgtcgacgcctgctgaccttttcccccaccccccccccctccctcaatcgccctgctgcacatcctcccgaccctcacccttacccctccccgttcaacccctctttctacacctctctatcgcaaagatggccaagattaaggagcgtggaaagactggcgccgccaagaactacatcacccggaaccaggccctcaagaagtgcgtcgtccctccgagcccgaggctcgaatcctggccggcctctcgcgaggtcgctcccgagaccaaggcagctgaccaacgcttcgctctcgtctgcgcgcatgctctgcaggcttcagtgctcgctctccgacttccgccggctgtgtatcctcaagggcatcttcccgcgcgtgcccaagtcggccaagcgggccaacaagggctcgacggcgccggcgtccttctactacgccaaggacatccagtacctgttgcacgagcccgtcctcggcaagctccgcgagcacaagacgtttgctaagaagctcagccgggctgtcggccgcggtgaatgggcgctggccaagggccttgaggagcgccggccggtctacaagctcgaccacatcctcaaggagcggtgcgtcggcctcccgtcgtttgtctgcagagacctccgattactgacttgacgctgtcctgcaggtacccgacgttcccgacggccgtccgcgacctgcccgacgccctctcgctcgtttcgctcttctcgcttctgcccgtgaacccgacgccgacgtccaacctgcccaaggacctgtcggccaactgtgcgcggctgatggccgagtggaagctctacttgatgcggtcgcgggcgcttcgcaaggtcttcttctcgatcaagggcgtctactaccaggccgaggtcgccggcgagaccgtcacctggcttgaggcctacggcttcacccagcacgtcagtcgcatgactgccccgtggtccgcctaccgccagctgacgtcccttgcgcaaatcccaggtcccgaccgacgtcgacatccggatccttatgacctttctcgagctccaccagacgctgctcggctttgtcctcttcaaactctacaccgacatcaacctcgtctacccgcccccgctcgacgcggccaaggaggctgccggcgccggtttcgactcgttcgtgctgaaggccaagaaggacggccacgacgatgagttcgagactaagtcggccgctgccggcgagaagcagaaggtgacgaagagggacgtcaagaagggcatccggagcgtcgccgctgcctcggccggcgcaatggacgtcgacgaggccgagacgccggtcgcctcgggctccaagtcggcggcggttgacgaggacctcgacgagtttgtcgagcagccgtccaagtcggatccgtcttcgacggcggccctgccgacgctctcgcagctcgcgacctcgtcggcggcgacgaccgcgctcaccttgctctttgcgccgtacaagatctacctctcgcgctcggtcccgcgccagacggccgagttcattcttcgctcgtttggctgtgcccaggtcggctgggacccgcgctcgatgggcgagggcgccgactttaccgacccgctcgatccgagcgtgacgcacgtcattgtcgaccggccggccggctcggatggcgctttcgtctttgaggagggcggcgcgctccctgccggtcaggtcgagcaccggacgtttgtccagccccagtggatcgtcgactcgctcaacgacggtcagctcaagccagcgggcgagtacgcccccggtggcgtcctcccgccgcatctgtcgccgtttggcaaggaggccggcagctacgcgagcgactcgcgcaatgccggtgtcgctgccgacgacgttgccgccgacgccgagatggctgcggccgcctcggactcggaggatgaggacgaggacgagtccgtcgacgctgcagaggaggcggcaccaccggcgctgctggcttcggccgtcgacccttcaaacgagctcctccggcgggcggccgagctcgaggccgagcagacgggagcgtcgatcgacgcctttgaggcccggctcgcggccgaaatcaagaaggcacgcaaaacgggcgcgagcaaggagaaggccaagtcgagcggcaaggccgacgaggacgaggacctccggcgcatcatgatgagcaacaagcagaagtccgtcggccgtgccttctctgccaaagagattagctgctgactctcctcgctctcttcatcctacaggaagctgctcgaaaagatggagtactcgaacaaggagaagtcggacgaggtgcgtcctgcccggctgcctctcgcacatcgccctctgctgacagcctgactatatctgcaggccgccaacctcgagcgcaagcggcagatcctccagaagcaggcggccaagaaggacaaggcggcccagcgcgcaggcagccagcagaagggtaagaagtcgcgggcgtagagccggcactcgactaggatgcaatgagcgtcgcgcgttcccaaaagtctcattcagcgaaagaccaggaatggctgtagagcgagttggaaggggatggacggtcgacagggccggcgccgtcgcgggcgttgcctgcgcgcatgcggggcgaggagaggattcggcgctgcttgcgaggcctccctcctcctacctacccatcaccggtcaccctcccgacgccggccaccgcccctctccagatctagctcgtgcctgtcctctgctctcgccggctcgcaagggaaaccccgtcgaaaaaaaaggaccggccactgctctctcccgggctctggatggcgcccgccgccgccgacccggccgccgcctctgcgcaccctcctcatcccgtcggaacgcccaaatacctcagcactcagccgctcgccgcctcgtacgaccctgcccactgccagcagccgcagccgcagttggccgcacccgctggactggccgccggccctagtggtcgccgcgttggcggcggcacaacctccttgtccttgcctgggccgccgccatcgctccgacacctgtcgccgtcgatgatagctggcgccggcgctggcctcgtctcgagcatcgtcacctgcccgctcgacgtcgtcaaaacgcggatgcaggcccagacaaagggcaagggcaaggccgtcgcctacgacagcgctctcagtgagtctcccttcttctcgccctgttcggcgctcgcagggcttggtcggccttggacgatagcggggtagggcgaggatgaggtcgtcttgatcggctcatgtcgagccgtcttggcctcgcatgggacgtcgttaggctggcctggttcagaaggtcatcgtcgagcgaggtctgtcgaccttgcgcagggcaggcggcgatggagggcgaggacgacgggctcaacgtcgaccttcggacggagagcgacgtcaggctgacctctacctcgttccagcgaccttccgcaacatctttcgcgaggccgggctcaagggcttctatcgcgggctcggaccaacgattatcgggtgcgtcaggtgcaggacggtcgagcgctggtgctcgtgcagctcgctgaccatgctggctccgcttctcccgccggcttgcgactgccgcaggtatctgccgacatggagcattttcttctcggtctacgacgttgtcaagcaggaactcggcgaacgctcgctctctgcgtcgtccggaggcttcaacagtgcgctcccgccgacctgcgacaggctggctggtcgcagcactgaccaggcttgtgctccgacccttccacgcagtcccggccgagtctaactgggcccatatccttgcggcgatgacggccggcgcgacggggacgattgtcaccaacccgctctgggtgatcaagacgcgcttcatggcgcagtcgctctcagacgttgcgaccggcaagcgctaccgcaacacatgggacgccattcggaccatctacacgcaggagggcggccgggcattctatcggggcctgatgccgagcctgctcggcgtcagccacgttgccgtccaattcccgctctacgagcagctcaagatctggtcgagtgcgtcgcacctcatcttccaaccgggtcagagcgcacgctgacgagtcacatccgaccctcgcagacaaaggcgacggcacgccgctcagctcgggtgtcatcctcctctgctcggcgacgagcaagatggtcgcctccttcacgacctacccgcacgaggtccggccagcgagattttggcttcccctcgcgcaagacgctgacgccttccgacttactcgtctatgcaggtcgtgcgcacccggctgcaggtgcagcgaatccagctccagcgcccggcctcgacgacctctgcgccgtcgccgttctcctctgccccggcccggcctccacccctcgagccgccattagcgctggctgtagcgccttcgccggcctaccgcggcctggcaaaaacaatcggcgagatcctgcgcgaggccggctggcggggcttctaccgggggctcggtgtcaacctcgtccggaccgtgccgaacagcgcggtgacgatgctgacgtgcgtttctgatccggcccgttctgcatctgttcctgccggctgacgactgcttcttcgtcctgccaggtacgagctcattatgcggtatctgacgcaggagcggctgcaggacgattagatgaggcgatgatgatcgagagtacagactccggtctcgaggttggctgggtcttgagggaaactggcgttttcacgatgcgcagcgaccgactcagagccgcccagagccagcgtcccagctggctttaagaaggagcatgcttttgcgggcgatgcaaccaacagagtcatggaggccagagtcgactcggtgacgagacgagacgtgctcgacggccagagagagcagcaggggcagcacatccagcggtctcagcgtgacacggcacgtcggccgttcccccgacagcgccttctctttctcgctctcctgctctctcgcaggctgaaagctgcgtcggcccgtctctcatcgctacaaggaaccatggccaccgacgacctgccgaggacgctcgccggctcgcgccaacgcagcttcggtcgagctcccatcggtcgccggaggagcagccgacggtgctggagccgaaccagcagtctctgggcgcctctgctcgtcgtccttgtcatctgcggttatttctgcaactggctcccgtgcgtgcagttccatcagcagcaaggcctcgcacggctgaccgacgcgtcttcgaccacgacccgcctcttgcagaccgtcgctgatttctggccgacgggtgagcccctactcgtcggcctcgactgtcgaccttcttcagacgttggcagagaggccgttgctcaacccatggacgcgcccgggctccattcggaaccgcacgacggtgcccatcgacttgcccaaaggcatcgccgactccgagctcctgcgacgcgtccgctgggcacccagcccggcggacggcatccaccccgattatggtcaggacggcggcgcaagcctgatgtcgctgctcgctgacgccgtcagggaagggacagttcccgtcgactgggagtgggcggccaacaagacgatccttggtatcggcgactcgctcatgcgcaataacgtcatgttctttgccgaccacgtctcgcaaggcaaggtagcgccccgagcgatacggcgacgctcagcgtctcagctgactttcatcgcccgcagttccagcgagagctgctgccgctgcaaggccctgacgggacgccctgggagctcagccaagggatgggcgtcgttgacgtgcccgagctcggcctcaaggtcgcccagtggttccaccagggcatggttggtcccagctgatcctgatcaggcttggagggcgactgagccctgattctccctccctggcacagatcgagcaggaaatcgtacgtcgtcgcatgcgcttgtgcccggcgggctatcaggacgctgatgttcccgcccccaagcttctcccagtctggcttctacgacggcatcaacaacccgcacgactttgagtctcggctaaagcacgtctggctcgggacagtcgaccatccactcggcctcgacgggcgcgagcctgacctaatcatctttgagaggtaagaagcaaccgagaccaagcggtccttgtttgcgcctaggttgacatcggctatcggcagtctctcgtgggacctcctttttcttgccacgctcgcgcggggcaatggcgacaagcgttttgatggtcggccgcttgacgaaaaggagatcgactggatacaggcccgccaagccgaggtcctgcggcttttgcgcgagacatttccgaccagcaaggtgcgacggcagtattcctacgttccggagctggactcacactctcttgccctccagattgtcgtccagaccgctcacttgggggccaagtcgcccgagagcttcttcgcgccgatacgatgccttcagcaggtgcgccgcctcgtcagccgaccggcagtgcgacaccggccgggctaacgtcctacctcgagttcgtctgcaggccgagtacgtccggtcggttgcactcgagaccggtctcgagctctttgactggggccggatcgtcagcccgttgagcaacgagatgacggacggcctccactatgttgcgggcgttgccacctggctttgggtaggtgtccgcactgtcgcgcatgcctcggagcgcgaactgatcgctcaatcttccctttggctttctctagggcgagatggtcggtagacttccattgccgctttctctggacgcttctaaaccactgatccggcgcgctgatcgcactcccccttcgtcgcagaccctctcatacctccgccgggcgcactttcatccggtcgacccgccgcctttgctcgtgccgaaatccaagcgaatctcgcagaaggatctcgccgagtcctatcgcgggccgagcctcatccagtacaccgagccgggcatcagcaccgggtgagcacatgcacgccgctgactcgttccacgcgcgcccggtgttcggtttgacggctgacgatcctctctgccgtccgaccgacaggacaaacgaaaagagctggctccgatactcgctccggcccggaacgccgctctgctgtgcgagcgtagatcggccgaaagctcgccatgcctgaggcccaagctcgtcgcgcagagtgaacgtcgcaggcgcgactacatggatgatctcaggtcgagaacgagatgtggatgcccggcctccgcgagaagggcaccttgacgcagcctctcctgcgatggaccgcgctgggccgtcttctgtggctccgggagctctgctgctcaatcgactcgtctcgtccgacccgctgcatgtcttctgcagggctccctcgtcgacaacatcgccgcccttgaacgagacggaaggcaggctcgtcatcaagctaggagaggcggggcgcgaccgtcgcttgtcgtcggctgacttaattcgtttgccttacctcgggcctctttccagccggaggagggcgcagggtcgattaaaactggggcgtagcatagagggcgggcatgcgagtctctaagagggaaggcgcgggggggagggagtacaacgtgcaaccaggaaaggggagagagcaaagctagaccgagagcgtcttgcctgccgccggcgcctcaagatggaccgaccgggcatccgggttggccgagacaaagtcgtacgcgtactcgccgagttccgcgtcatcaagaccgacgacctcgctctcctctgtccccctcagccggaggaacggcacaaagtggaacagccagcagaggactgtcgtcatcgcgagtgagtaggccatcgcggcgacgctgtcggcgagctggtagccgagctggacccagtgccggtcgatccacccgccagggatgacggtcgagccgtcgagcgctgcgaccgaggcctgggcgaacagcgccgtgagcaggttgccgacgacgccgccgaccgcatgcgtcgcaaagacgtcgagcgcctcgtcgacgttcaggaggaacttgaggcgcgtcgcgaagtttgtgcagacggccgtgacgaagccgatggcgacggcggctgagggttggacgtagcctgctgcaggggtgatgccgacgaggccgacgacggcgccggaacagaggccgacggctgaccacttgcgctcgagtcggtagtcgagcaggagccacgtcaggccgccgaccgaggccgagatgttctacgagcgagcgggcgggcgaaagagggcatcaggaggttgcggcgcgagagtatggagcgcgaaagggcgacgcactgtgacaaccattgcattgaccgcgcggaggttggccgacccagccgagccgccgttaaagccgaaccagccaaaccagaggaggacggtcccgaggatgacgtgcgagaccgagtggggcttgtacgcgagccggtcggtcccgtatcccctccgcttgccgaggtagagagcgatcgcgagcgcagcggtgccggacgagatgtgcacgggcgagccgccctgtcagacggaaggagggaggagggcgtcagcgactttgtctagcaagagacgaggggggctgaggggggccggggtgacgcactgcaaagtcaagcccgccgaggacgaacgaccagccgtttgcgttccacgtccagcacgcaatcgggcagtaaacgatcgtcaaccagcaaaacgcaaaggccaacatcgggcccaacctgccgcgctcggcgaaaccacccatggcgaggacggcggtgatgcctgcaaacatgccctggtagagcatgtagagcgacgacgggaggcgggtcgtcccgatcgagggctgctcggcgacatttcggagggcaaagtagcggaggtcgccgatgaaggctgagccggtctcggagaaggcgagggaccatccccagaagaaccattggaactgccagttcaaaaagggggaggggcgtcagcgcaggaggaagggagagaaggtcgagacggaggcaggacggacgttggcgaccgacataacggcgagcgacatgtaaatcatgctgagcgcattcttgcgccggagcaggccgctgaagcaacgcagagggtgaggggggcagggtcgtcagctgtggccgtcgtttgcgataagggatttcgggcgcggggcggggatgacgaacgagtaaaagaagccgacgctggactaatcagatggagctcatcgacaaagaggatgatcgactcgccggcctcctgcgccttctcgatgtcgttcatcacgcccttaacgcgctcctctgcgagaggtgggagagagcggacgagtgagcattcagaccagacgacagtaaacagcacgcgacgcggtgttatgtgaagcgagcgagaatcgaaggagtggtcagataccagctgagagcgaccggcctcggaaccagaaagaatgagagggactgaccgtattctcccttgtgcttggcgcccgccatgagcgcgccgaggtcccaagctgagctgccgcttcttccaggtacgtcccttcgaggcaatcacgctgagtaagagcaagcgccgattagcttgctcccctgcagatcgcgctcggcaccggacccgcgtgcgccgagcaggctgacgcctcggtgacggacaaggaccgcatgcggtctgagagtttgcatcaagcgcaagaatttgggtcgcatcggacgaaagacatcgtatccgagcgatgcgacagtcctctcgtcggcgagactcagcgccggctgccgccgccaagatgggcgttgatggcgccgtagcggccgtctctgccctcgcgacggatgatgcgccgttgcggtgcgggcggcgtgtcgtctcgctctgtcgaacggaaagggaggcgtgtcagctgcgagccaatcgcgcgagcgggataagggtgcagatcgagacgtaccactcgcgctccgctttttggagtcggtcgcatcagctggtgctgctggcgccgacggggcagaccgcgtaggaggaagactggctggagccgccgacgatggaggcgccgaggcagctgctgcaggcacaatgcccatcctgctcgcgagcgcgcctttgctctgctctgctctcggcggctcggctcgcgacaaaggcgggcctcctcggctgcctgcgggaggagtcgttgctcgctcgcgatcggcgactctcggcggcgttcggtcgcggccacgagccatcgactgcggagggggcgggccggaccgaacagacaaagaaccgcgcggcggcggagccatgtgcggtgctgcgtcgcggtcgcgccgcggctcgcgcggcatggcgttggccggcgacagtgagcgcctcgtcgacgagttgacgccgctcgcgaagcccgatttcggctgttgcacaaacagatgagggacgtcagtgccagtcagaactcgcccatgcgtaaacttgtacgcacgtcgtcgtctcgccgagcccgtttcggttcgcgcgggtcacggtcccggtcacggtcgcggtcatctcttggcacgcgcgagtcgcgagccggcgatagatggcggccgttgcgatcgacatgggcatcccttgggccgcgctcgcggtccctgtcgcggccgtcgcggccgtcacgtccgcgacgaccgccgcgggctgaacggctgcggtcgtcccggtcgtcgccagcccggcggtgccggctgtcctcgtcgcgctcgcgcgccttgcggtcggcccgctccttgtcggtctctacatagcggccgtcgcggtctttggcgctcgtcgagtgccgcgatcgcgtgctctcgacgctgccggcgcgccgccgacgactgtcgggcgagggcgaccgtcgaggaggcccacgggccggcgaggccgaccgccgtggaggtgaagcaggccggcggtcgccatggctagacgaaggatgccggctcggcgcaggcggaagcgagtgctgtggcaccgagctgggaccactctggccaggccgtgatggcagggtgtcgcccctggcgccattcacactcgagctcgatgggttggtcgacatagggggtctggccggcgccgcataagcccggccgtcgcggtcaccgttgacgccgcggggcggcgaacttgggcgagaggaggctccgcggctcggagcattggccgagagagcggccggcggagcagagccgctcggccgagcgctctctgacgccctcgaaggcccggcctgtgcccggccacgatcagtgtcggaccgaggtccgctcggggtagtacggtcggctgcctttggcgcagcgaggccgacggcgataccgctcgtcgacgcttgcagccgtgcacggagcgactcggcctcgaggttgacggcgtgaggcttgaccggcgtgcctgctccattggccgacggaagaggcgtaggtgcctttgaaaccgcggccgacgcgctcgtcgagacgggtgccgtcgcgacagagagagctggcgcgatcgacgcggccgccggagctgcagggacgtcgacgtccatggcctcagccttggctgcaggtgggatagtgggcgcgtccgttgccttggaggcggccgagctagtcgagctggtcggagcgaccggtacaggcgacgaagcagccgccttagcctgagaaaagggggcaccagtgacaggtcagtcggcttgtctgtgtggttagtccagtctagcctaacactcacagccatgagcttgtcttgcgagagccactgcggcttgagcttgccgagctgcgacgagtatctgcggcggcagcagtgcaatccgggtcagcgtcgggggcttgtaagcagcaaaatgagctgccggcaacgcacgactggagcaggagcttgaggtcctcgcgcttctcctgcgtgatcgcattcttgatgaggccctcgacctgggcaccctggcccttttcgcgcgggaagaacggcaggaccttctgcaggaggatgacgacgttcttgatgcgcatgtactcgcccgaggcgaggcagagctcgagtgcctgcgacaggaacagccgggaaggtcagccggcgcaagtctggcgagagaccggaagcaagcccagactgaccgtcacgaagcgcgagctccacttgtgcgcgaccttgcggaagccgtcccatggcaggaggatgtccttggtcagcggcgcctgcttgtccttgaggttgtggatccggccgaggcggaagccgggcagcagcttgtcctcgccgtgggcctccttgacaaacttggcctcgtccatgcgccagctcgtcatgtcctcgaggcagtcgtgcatgaagcgtgctgcgcggtcgggcagggacgcatcagcgaggagcctcctgtttggttagggggaaggcggcgcaccatagttgcgggcctcgttctcggtgaaggaggcgacgagcggggcgatccactcggtgaagacaaactgccgatggatccgcagagtcagtaggcgagcgagcgagcgagcaaacgagcaaggagaccaacgtcgttgtagaaccacatcgacgcaaagttggtcgtcccgagcgtgtgcatcagccggaggaagcgagcgctgaacgaggcgtcggcgagcgagagcagcgcgcgggggaagatgcagtgctggaagatctgcgcgtgcagcgtcttgctctcggtcgcctctgcaagcagaacagtgagatcagcggcaagacaagcgcgcgagcgactgttgagggacgcactcctgaaccagacggcactttcgatgttgagccgccgcttcgagacggcgtaggcctccatctgagcgtcgcgctccttgacgagcgcctgcgacttggtctgcagcagctcgcgctcgcgccgccactggtcggtctgggccgaggccgggaagcggccgaggtcgccgtttgctcgctcgagccggtcaatttcacgctggtaggccttgatcgggacctcgaggtcgtacggcgccagctgccagaaggagacaaagaagggagcgctgcgatcgcatggccccagtgagcgagccgcccgacattgaagcagtaagcaggattggagactcacccgagcatcgtcttggtcggcggcgccatgattctgagggccgaaaggatgacgggcttgagcgacgggtggtactttccctcctgcggcggctgggactggggaaaaaggacggtcagccggggcgggtaaaacaggaaggaagggacgcaccgatccaaggcttttggccgtgagcgcgggcgagactggcgccggcgacgatggcgccacagcggccgacgaggcaggatcagccgcactgccgccctccttcgagacaacggcttccgaggcgctcgcttctgctgccgctagctcagcggtgacgaccggtggcgtgctcgctgccgcccgcttgcggtccatcatctcctgcttcagccgggcctctttggcacgcgatgcgtcgcgtgccttttcggcatcgaccttgcggacctcgaacgcgagcttcggccgcaggatgtggaacgcgagcgagggcgagaggccaaacgtgtcggccagctcagcgagcgagggcacgagcgcggcgtactcgtcggccggcatgtgctgcaggaggaagtcgacaaactggaacagaacttcggtcgactgacggtgagagaaaggggctggtcagtgcgggcgatggaggggaaccaagacggcgggcgactgacgttgtcaaagagggacgagaggtgcttcatgtgggcctcctcctctgggacggtaaagatgcaggcctcgcgggcctgagcaacggcgacgagcagcgggaggatgaggttgtcgtcgcggaggctctgggctagcttggctgcactccggccggtgacgccccgcttctcgatcgtcatctcggctcggacctcgacgcctggctgggcaggtggcttgacggtcggcaccgtcgggtgaacggcttcggcgcgcaggacggtgccgccgcccatcgcggcgacctggttgtccgaaaggttggcgagcgggtcgacggccgtcatggccgagacgagctcgcggaggatgatgagatcctttgggttgccggcccggagctggttggcaacgtagtggaggatcggccggcagtcaatcagactcgcgtgccgcctgcagagctcgccggcaaacgcagcgagcgccttgagccagagcgaggtgctcgtcccgtccgtctttgtccgctccttatccgggttggaaaaggcgtcgaggagcgaaaagacgatggtgtcggccccgagcggggtgatgtagcgcgcgctctcgacgaccggcttgacgaggttctcgtacgactggatctggcggaggacgaccgaccagaggacgagcgggtcggcgtgcgagagcttgccgagcgcccgggcgtgcagcttgatgtcgtcctttgacacccggcggaggacagacttggcgtcccgctcggccgaggcgccctggaccttgagctggagcgagctcgcgtactgggcccgccagaagccgtagatgccgtagcgggtctcgaccgagaagagggagaggagcgcccaaatctcctgcgaggtcgagcagcagccgccgctgagcgagagcgacggcaagaaggacaggcggagcagctcgttccattgcgctttgcaatcgggatcctgaagaatgcggcgcacgggtcagcagaagcggagagcattagcaagcaacttcgacccgagacggacctcagcaaccgcagcgcgcccaagccgaacgaggcggacgagaaggtccttgcgccggctgagctgggcgccgagcagtcgaagcaggccaagcgcgctcgtgtcggccaccggtcccgacacgaaaagctcgtcgagcgatccgacgggcacgagaccttgcgaccattccgggcagaagccgacgaagcgcgtcgagcgggtcgcgaccggcgtcggggcgatgagcgtcagctttggcgttggctgagggagacctggcccgggccgacttgagccctcgggcgtagccgggtcggccgcgacagcaaagagcggccggaggacaacgtcgagctggcggagtacgagatcggcgatcgctggatcggcgctgacgaggtgcggcaaacggccgaggaggtgggccgcctggccgtgcgcgccaacgacgagcagggcgtggacgagtggcagcttctgctcaggcaagggcagcggcgggagcggggctggcgctgcgggcttgtcgtcggacccgctagggccgtccttcgctcctcctcctctgccgctgccgcctgccgcaggcgcctcgtcgtcgtcgtcgagcgcagcagccgcagcgagcatcgcgttgccccttgatgaccgcgccttctcgttgacggcgctccgccacttgccctcgagccgatcgaccgcggcctcgtccggcgacacgtgcggccagaggtcctggagccggacgatgccctcgcggatcagcagcccggcgaggaggtacatctcgtttggcgtcgtcttgccctcgcgcatgacgtcctgcgcctggtagaagcgaaacttgaagccgaggatctgaccgacgaccgctcggccgcgctcgccagcgagatcctcgtccagcgcattgatggctggcgggggcgcggctgagctcggcgccgctgccgctgccgcccagggcgagcaggcgagtagggcgaggaagaagcggtgatgagtgaggatgagcgggaggaaggcgtcgaggaggacgtcgagcgtccggttcgggtcgagctcaaagaagccaacgaccgacttgagcttttcccagaggctccgcgcgcgccgggcacagacgtcggccgctaaaggcgtcgagcgtcagtgagaagcaggagaggaaaggttggatcgagagtcagattgaggtgcagtcctcgagcagagcggcggtttgataacggcgagggtagggggtatggcggcggacggcagcgacggcttgaagacgaatgcgtcgcctcgcgcgcaggggtgggccgggtgccgccgcagccagacgtgggaaagggagaaagagcgcacgttcgatgtctgagcctgtggcggggtccttgcccggcccgaggttctcctcgctgtgaaggaggacgaggaggagagagtagccctcggagctctcgcggaggagattgaacttgcggagcgagtagctgggcgggaagaacggcaacccacctcgacgtcagtctcgttcgaagctggttcctatgtcacgacgagcaagagaggacgcacaacttgaccgtcagtgcccgggtattgcgccgggttaggatgtcggccggcgaccggctcaagccgacccgctcgaggaacggatagtcgaagcgatcaagcagcgccggcggcaggcggcccgtcgcccagagcgcgcgacagaaggccgtccaggcctgacgggccgtttcggccgcggcttcggcgactgagccggcggaggcgctcgcgagccgctcgtcaaggatcgagtcgagcgtgtagagcgtgttggcgacgatcgcgcagaggtcgctgctgctgctggcagctgctgcagcagtcgctggatccatcgcgtcggcgaggagcgtcgcgagctcagcgggcgccacgaccggataagctgccggtaggagagcgttgaagaccttgtaggcctcgacgacgccggcgctgccgagctcggccagccgctgctggctgaaagtcaggagcaggcggaacaagggaggcgaggtcagccagagcacacgtctcagtgaggctgaacgcacaggctctcgcgcccgccagtcgaccaggctgcgacggcctgcttgatcgcgtcgtcgtcgtctgctgccatggctggcgagaataggaaagggagtgagggttgcaggagacgacctccatcgcccgcccgccgtcgctgccaggccagacctagggttaggctttttcccgcgcgtgcctgcctgccgccctcggccgacctcgtcgccgcccgaccaccgctgcctcgaccgacacctccgccctctcccaacctcgctcgcctcgttcgcttatgtccttcgtccgtcccagatcggtcgtcatctgcaggctgtcgctcgactgacggtcttctctctcgcacacgaacgcaggtctcgctccgcgccgccgcccggccgctctcgctcgctgccgccgcccggccttcgaccctcctcctggcctcgtcgtccgttgcctcgctcccacccgtcccctctccaaagcgctgacacgtgctcctcgcgcggctcctcaggtcaaggtcctttgcgcactcatcggtcgcacgggcagcctccgccccgaagattgactcaatcgtcgactcgatttcgaccctgacgctgctcgaggcggccgacctcgtcgccgcgctcaaggtccgtcagccccctactggcctgatcctctcgcatgagaagcccccttccccttctaacgctgacgctcgtggaactgttggtacgcctgcggtcgagcagaagaagctcaatatttccgagattgcgatgcccgccgccggggctggcccggcagccgccgctgcccctgccgccgaggctgagcccgaggtccgtcgcacttctaccctaaccctcgcaagagggcgcagtgggcactcctgctcggatcggagacaatagctctggctggcagtgccgagcgtcgtcctcctgcgtcggaggaggtcgtctgccgagctcaaagcaacttgcagaggagctgactccccatccgcttcctctttcaacccctcgctgccttcctcgacccctcctactaacccctccgcgtgcacggccaaacttaggagaagccggttgagaagacgctctttgccgtcaagctagagtcgtttgacgcgagcgccaaggcaaaggtcatccgcgaggtcaaggccgtcatgccaaacatgaacctagtcgaggtacgttttacggtttgggtcgtctgctacctggctggggtggaatgaggttggcgttgcgtgcttagcgcttcgtggtcgtccttgcctggcttcgtccgcctgcctgcttgccttctagtcaggaccgtctgcctgtccgacttcctgacccgctgatcactttctcctccctcaacctgctcccctctcctgtccgaatcgacccgctcgccaggccaagaagtttgtcgagtcggccccgcagattctcaaggagaacatgtcgaaggaggacgccgaggcgctcaagaagaagctcattgacctcggctgcgtcgcctcactcgactaagaggcgacgtcgccagagaagcagtgagactatgactaagagaaactcgaatagatgcaggggcgggaagggggtgtaggaacgtgcaggcgagaggattatggggaggcggactgttaccgggatgggggaaggacggacgcggttgttctggacgacgtgcgacagccgaggcaggtccgagacgcccggcgtcaggttgttgatgcagccctcgatctggacgagcgagcgagccggcgagcagaggttagccggaggaggcgccaagcgggagggagcagcgtttgtcagacgcgacgacgcgaaggaaagggagaggagagacggacatgtgcgacgcaggcctcggtttcgcgcaggcagtcttcgatcagctggacagtctgcgaggcggcagaggaggaaggtgccgatcggccggagtacatgctgggctggtctgcgagatggagtggcagggtcgaagggcggggtcggtgttgatggacagacagcaacgcgtcccctcccgctcgctccctccgaaccaccatctcgccccccgccatgccgccagacaaacagcacacggcactcgcgacccaggtcggcggccatcccggcatcctaaccgaccgctcgggccggaccgtcgtcaagccgcttctgcccgtcgagctcgccttttaccagctacacgctcgacaccctcccgctctggctcggctgcctcgccttcgtcatcttctaccccggccgcttcctccggccgcgcacggccggcgcgcacgaatgggcgtacgacgaggcgggcaacttgcgggccgaggcgagcgagcctgtcctcgccggcgccggtgaggaaggaagcgagggcgaggagggcgagaagaagcggaggcggtggtggaggcgccagccgaaggcttaatctaggtggtctgggatttcacatcctcagtcggccttcggctgaccttcaggcgagcgcgcttctcgcttgcttcatctcttttcatcccgttttagtctcgcttcccagatttcaaagggcgcgcttgcgccctcatcgttgtgactgttcccacccttgtacaacctcttcgttcacttgactcttcataacccccccccccctcctctctttcgcttctctcacatgggcttcggcgcacttcgacgtcgtttgccgcggggccgtccagggccgatgaacaggagatcgagagagggagaaagagggaaccgcatcagaacgaggtctgatcgaaagggcggccgcacgacatcgcacgggcgggctggcatttacgcagatgtcccccgccagcccgtcgtcaatcgcccaagccagccgccaccagcgtcctctcgctgtcgtccgccaatgcgagcagctccatgcggcctatcgtcaattgtccactcttcgacgagccgctcgagcgtccctcctggctcgacctcgcgcaccccgcctggatgtccaaacgcccttggcgcgcgttggaagccgcgccaggggtcgctcgggccgccgccgtcggaggtggccgccgccgccggcgcgcccgagcggagaggtccgagcagcggctcgtcgtcgtgcaggtcatctggctcgtcgagacccggcggccgtcgtgggtgagtcgtcgccggtagtccaacagggtcgtcatcgacgtccatggcctcgactccgtttcccactgccggcgctacccacgacggatgaacggcgatcgacgacgccgcccgggccgctgcgaagcccgcctggccaaagacgggctcggcaatcgcaagatgcccgtgcgcgaggtatcgctcgagctcgccgtcgccgtcggagaacgcgctcgatggcggtctgcggctcgtcgaggacggtaaaacgccgagagtggcgggtttgacaaggcggatcctccggagcttggctgctcgagtccgtcggtgcgcagcaagagcgagggcgaaccaggcgcagaggttcagctgggggtgcgagccgaatagaccacagaacatacaaaagggggtcagtcggggtggtcagtggatggcaaccagccgaacggtccatcgtcgggcgattgacggcaaagagtgagctttgcgcaccagaatctcggccgccaaagccgccagccacacccaaccggcagcgctagcgtccgacacttcgggcaagtcatcgaccgccgccgtccgattggtacaagttgcaaaggcagcgacaccgaggcggccaagccaggcgagtgccatcagaacgaaccaggcctggcgttctggccgctgagtgggtgggccgaagccaggcctccgggcggtctttgaccaagttggatcccaaaacagccaaagcggcgagacgaggtggatggcgagaaggagcgcaggagacgcgacaagtcgacatgccgagcggacgatatgctcgagaggcgcgacgatggtcgctgggaccgaggccagaacggcgggtagggtcgagggggtaaggtctgtcgtgcctcacgggggtcaggtcatgcgggaaagcccaagtccgccgctatctggcgtactcacgagccattgggagtccagacgcgaggcaaagtgaagtgaaccagagaagccgcttggcctcccagacgagccggtggccgaccgccgtgtctactgcgccgtcctgcgagttcaatccgttggccggacccaagcggcgcggccggcggaggaagccgccgaggacggccgtccgggaccggtagtcggctttggccatggcctcagcaacgcgtggctcgcagcgattgcagacgagcgggtggcgttcttcgagccgcgcgcggtaggcaggctcgccctcaagcacgcgggcatactcggccggcgagacggccgctgggtctgggaggtaggctgcgaggaagttggtctgaagcgtagcgtgcgaggtgcaggtcggacagagcgctgttggaaaggtcgacggcgagagatgtgtcggcggcgggtacgcgcgtgaaggagggccggggacggccgtcatggctgagtgcggcgagagcggctggccggcctagagaagcgagtactcagcttagcagatgctatcgctagctacattaggaccgtgtccgcacctggtcgaggacgttgaagcagccgcagctctcacaccgccaggtaaaggccggcctcgcatcctcgtcgtcatcggcctggcggcggcgacgtggcttagtcggcggcagcagcagctgggaccccgaagaggaggaggcgtgtggctggacgtggaggcagaagaagcattcgagcgtcggtttggccaacgaccggccgtggcggaacatgctcgtgatagcgtccttgtcttggaagggtcgtgctggtcgttcctgaccgtgctggctgaggtcgaggtcgagatccgtcatcctgcattgacttttatgcattgaccgaggtcgcaacgcgtcctcgcgcgtgttgaggctcgtcgtcaacggtctctcgccctcgtcctcgaaaccacagcccctgctcttgacgacagttcggagcactccagtcacttcccttctcgaccgctacgtgtagcgacgattcaggcgcccatgccggcccggccgccgccgccgccgtcaacgagcaccgggagctcgagctcggcctcatacgccaagacgctgccgccgccgccgccgtcgtcgccgcttaagctgtcgtcagcccagctgctcggcccgacgtctcctggaggagagccgagtgggccatcgacaccgactcggctatcgctctttgcgccggcccttgatgactcgccgcttgacgaccgtggccagcgcgcgcccgtccgacggcgggcctactttgccgacgtcgttctcccccggtcggcggcgacgagcgagctttcggagcccgtcgccttcctgctctcgacgctgggagaccccctgagcgcgccgccgtttccgccggggcaggatgagtcgtcgaacccaaagctggcagcggcggccgccgccgcagcagcgagctcgacgacgcccggtcggatggtgcgcgcggggtcggtcgacccgtcgtcgagcgagagtgctgccggcgtcagcacgcccgatccgcgcaagctcgagccgctcgtaaccgagctgctgacgaccgagcggacctacgtccgtcgccttcgggctctgaaagcggtcagtctcgctgtcgaggcgcgatctaagcgtgtccccttgcatgagcgcaggctgaacctcctcgcaacatgcaacagacgtacgccgacccgctgcggatctttgcaaaggacccttcgatggccatcatcccgtcgtacaatacaacggcgcttttcggcaacatcgacgtcctgctcgccgtcaacgaggcttttctggccgacctcgagcgggccgctgtcggcggcgggccgtttggcgtcggcgacgttgccctccggcacttccgcgacctgcgcgcgtttgactgctaccggcactactacgacgcctgcgaggatgctcaggcgatgctgtcggacatgatcgcccggcgccgcaactttgcagagtttgtcgccgcgagcaaattcaagactgaggggatcgccaacgtcggcctcaaggagctcctgatggagccaatccagcgtatcccgcgctacacgatgatgtgggccctgatggtccgctttatggacccgctcgatccgcaacgggcccggctgctcgaggcgagcgagattgcgcgcgcgatcgctggcagcgagaaagatgaggttacccgccggggcatggtcctgatgggcctcggcaagagtattgaaggcttcccggtccgttctttgcgtctgacgtcgcagcttccaaattccgggagctgactctcgcctccgtcccgcttgccccaggccgagctcatcaacaacaatcgcgactacctgtcgtcgctcgatgtcgaggacacggctctcaccgcagcacctttagacccggtctcgccggcatcagcgcacccgtccggctcgccgccgctgcacgagacgctcattctcttctcggaccggctcctgctagcaaagcggccgtcagcgtcgtcatctggccggcgcatcaccggcctcgacgacctgcctcggctctggaagggcggcgtcggcgcctcgtcttccaccggcggcggcgtgggcggcaagcgagcgacgacgcctggcgggggcagtggctgggagtcggacggcgggcaccgcgcaggcggaggcgaggcaggggggccgaaggagcgctcggtcgcctgtaagggcctgactgcgctaaccgacctcgtcgccgttgacctcggagggccgtccttttcgctctcgatcccgcacgcgctctcgtacgccccgccgtcgtcgtcttcgtccgcaccggcctggacgaggccccaccggcatctcgttgtctgcccgcctccacaacttgcagccgctggccggccgcccgttgtcgtcggcaacaacgacactcggcgtacaaaggctgacaagcagcgcttcctcgccaacttttgggccgcccaggcgctcgtcagggcgcgcaagggcggcagtcgggtcgtcatcggccgcgaggaggaggcacttgccgcctctggcgccgctcagggccaggctgcggtcggcgagaagggccggggctacctcaacgtctggcatcgcggtgactgggacgaggaggcgttcaaagccagtcccaagccttgagtgctagcacgcccggcacactgtcgctgactccagctttccgctgaccctctctgcaggccaaggttgtcgtccagatcgacgagtcgggcgcggatgtcttccccagctgggagaccgacggcatgcgccgggtccagctcgtcgtccgcatccagccgctcgcgggcggtctgagccgcgtcgccgtccggacacgcgaggtcgacgagcgcgacgagatcctgccgacgacggccgtctatgcgcacctgcttcagacaagtgcgttgttgcgatgtcgacgttggacgtcgagtgcttggctgacttctgcggccgctcatctccatcttcagtccatcaatttggcgtctacatacctcggctggacttcccgcgttcggcaccgccaacgccgacccatctgggcgcctcggtccgacggccgatcctcgggctcgatgccctctcgcgtaatctgtttggctcgacctcgtcccgcagcggcgagtcgtcgctctcgagcggcgcagcgtcgcacaagcgcacgcggtcggccgcaagcaaggcgggcagcagtgcagcagcgaccgactactcgtcgagcgtcacccgatcgaccgtctcaagcctggcctactcgaagctctctgacgcggccgactgcgacgctcatgcccggctcggccaccacagccgcgagggcagcggcggccacccgaacgcgtcgaggagcaagagcccgacgacgtcgccgcatcgccgacagtcgcccggcggcatgacgacttctcggagcggctcgacgagtcccttcagtgcgcgcaagcccgtgccgatcgacgaggaaatggctggcccagctttgtcgaacacgaacggccgaacaggtctcgccgacgacggcgaggacgaggacatgggcgacctaggccggcagctcgagctcgcgcggaagaacagcgagagcgcccgggggtctttggccgaccagcggctctggcaagcaaatgcagacaaaggaacgtcgttgcgaggtctgtccgtgagtgctcatttgaaccgaacaacaccggctgactcgtagccggaacgattgcccctctccgtagacgatgtcgagccggcgcaagaggtgctgagacggccgcagacgcctccgttcaacgaggctctgcactgggccaagtcaccacctgcgggcgacgccctcggcggcgtcctgcgcgccaagtcaccgagcgtcgctgaacggcggccttatggccctcgtggaccgacgggctcccgcgcgacgacgcctttgcgagcggcgacaccggtccgatcgacgacgccgtctgcttggaccgcacctctccggctgtaccctgcctcgtcgcccgccggggaccgcatctccctcggcgccggcccgagccagccgtcgtcggccacaaagacgacccacggtcggcgcgtctcggacgagtggcgcaatgcccggccgtcaccggtcgccgccgtgccaagcacgacgcccggccctctcgaggagacgcccgactcgccgtcgtccgtctcgtctggccagaagcgcgagcggcgtggctcggttgacgaaccgtcgccggtgctcgacaagaagattcggacctcagacggcaggtctccactttcgccgatccggaccgctgcgaccgctccgcagctgccgcccgttagcggtctgagcatccgcaagtcgtcgttgccgactggtagcgtgccatcccaggcgccgcgcaaagtctcgggcgcgggcgtgacaaaacgcatctttgaggccgagaaggccacggcgagcgcccacgtcgaggatcggatccttggcgccgcacgcgcgacgcaggaggatgtgcgttttccacccgcccgctcagccatagaaaaacaccctgctgacctccctcccaaccatcgcaggtctcggactctcgacggtcaagtaaacgtatcaaactcgaggtcgagggcctgcgcgggcacttttcgcgcaacatcggccagaaggaccgcctgcagcgcgttggcgagacgggctccctgccacgctcgcctccgagccgtaacatctcggtaagccccgtgggcgatcctcccgacgccttttgtcccctcgctcgtcctgacccgacgcttcgcccggtgtcagatccgcgccagcaaccggcccaccgactcgcgtgacaactacgagtcggcagcgacgcccaatgactttgtgccgccctcacgcgcctcgtcgtctcgcaaagccggcgtcgacgtcgccttcctaaccgactggtgcgccgtcctcgagggcctcattggcgagctcgacggagggctctcgcgcgcggccgtcaactcggaccggctgagcgcagacgtcatgggcgtgatcgaggcgaagcgggtccgtccgctccctttccttgcccctgcacgagaccgaggttgacctggtcatttgttatacgtagctctcggccgtcgacaccgctgcgctcaagggcaagctcgccgaggccaagcagcagctcgaccaagcccatcggctggccgacgctcagaagatcgagctgctcgatgccaagaacgagaatgccgcgctttatgaagtgcgtcgccgtccgttgtcggcgtgacaacactcctggcctttccgtcgtcctgaccccccactgctgctccgtcgatgacaggcgtttaacgaggagctcgagcagatgtacaccgacatgactttgcccggcgccgaggccaatttcgccatgaagcgcgaccttcagatgacgaaagccgaccggaacgcgcttcggctcgagaatgcgtgcgttagcggcggtgtcctcttcgctcgctcccttgcgaagtcaggtgctgattgaacccttacatctcggctcctcgtccagcacgctcaagcttgagctcgaacatgccacttacgagaaggaccgctacgagcgcatcctccgcgaccggggtctcctctagccgtcccagtgcgtccgccagtgcactcttttctccgatcgtgttgaccgtcactcttcccttctcggactcaacatctttcactaactcgccctctgccctcgtgccttgcagcatccaacctccagcccactctcttttctctctcgtcttccccttttgttctgctccaattcatcttctcgcttctgcccaaagactccagacacgaccccctttgatgaccgcctccttcctgccttactcgactctcttcccacggacgcttcctttctttgacgcgcgactctttcgacggatgttgacgagctcctgaacttccaccttctttggcgtcgggctggcgtcattcggaagaggctgagcagggcagagttctcgaccccggtgcactttcttcccttcaaccaccaccgtcgtcatcgtctacctctcatcgtcctctagtcccctcgccctctcgcgtcgaaagacgttgaagaggcgccgctcagaacagatgcccagcagcgacgtcgagatccccgccggaaatctcgagcaactgaaccgcctgctcgcggctcgcgccaaggcttatgagggcgtcgattttggcggagttggcgttggacgcgggggcggcgggggaaggagtgggagcggttgactgagcaaagccacatatgcgtcgccgtcgtggtactcctcatcgtcgccgtcactcgggcggtcggctgagccagtcgagaagctacggaaggctggcggccggcggcgaccagtgagcgcctgcttgcttcgacctcgctgagcggccgagggtccatcgtcgccgtcagacagagtctgcctcgcgtcgtcgtcatccccagggttaccgtcgtctgagtcttcctgagctgatgtcgttcggccggtgcccgatctgtcgccctgacgcttcgactccttgtccagcagcttcatgacgctgacgccgctgacgccctggaatgagcgccagtgcgtgccctcggggctagacgagaccgggcgcggccgagccagagaccgagggctcgagggattgccgttcgattcgacctcttgctgcgccgccagcaagacctcctgcgccgccgaagcctctgctggatggatgtgaacggcaggagtggccgtagaggggtagtcacggccaagcgtctcggaaacaaggcgctcggtctcgtcgtcgtcgggcacctcgacctcttccgtccagacctcgagtttcggccgccggcagagctcgagaggtccttcgtcctgcgaaaagagcaaagccttgtcagccacagggcctcagctaacgcatcgagagcggcacacactggctctctcagtgagcgcagtagattcagtccttggcccttcatctgttgcgagagaaagctagcctggtgtcagccgcattcgggagaagcacacaatgcgacgcaacatacgacggcaacctggtgagcaaacatggtctcgtcgaagccggggtcgagctcgaagagcgaccgaagctcggtgatcgtctgcacccaccaggccggcgacgagagcagcgggatgaggtgctcgcggatctcttcgcagaacggccgactgcgcggcgaagagggggggggaaggaaccgtcagtgcgagcttcacagcagaactaggacgagcgacgcacccgatcagcgagacgggcagccacagccagccgtacggatagctcctccagccatctgggtgtttccacggaaaggccaaagagttgtcgatcgctggagaaaggagaagtcgcgtcaactgcatgttggcgatcatgagctgctggcccgactccctcaccggcgatcgtgatatgaggccgccgctcctcgaacgagactttcggaagccggggcgggtgactcgttgtcggtgagaggatgggcgacggcaggcggtcgatgaccttgttaggcgacgaggggctcgccgatgcgtagctgatcatctgcagacgagaaggagccaatgtcagcctgtatgccgttcgaatttggcgattacacgcacaaaattgtctctgcaagttcagggacgacgtcagtgagctgggagagcgagcagaaggctcgacactcacaagccccggtcggtgttgagcatcaggtagtcgagcgcgacgagcttctgaagctcttcgcagaagccgtccttgagctcaggcgtccaacggaatcgcccggcgttgcgctccaggtcgcccgtgagcgtcgcctcgtcatcgtcgtcgttaaggacatcggcgcccgaccggccgcagatgccggcagcgaagcgcaggcagcgccggaggtgatggcggctcgatttggccgcctttgagtcgtcgatggcgacaccgtgcggccagggatgctccttgagccactgcgaggcgtccgtgaagccgcgggcaaagagctgcaggtggcggtcgagaagaagagttagacttatccctcgctcaggcggtctgcgtcattaatgacgcacctggaagctgccgaccttctcgggcaagggaatccccttggtgacgtgagccgtccggtcaagccagtcgtaaaagaacgccggggacgagatggcctcgagctcggtccgtggcacgaggccgagaccaagtcggcgatcgaggtgcgacgcagcggcttccgacaggtagctgagaggatggagtatcaggagattgcagccttcagcagacaccgcgaacacgagtgacgaacctgaggttaatgatgaggcacgcgcgaccgaagccgacccagctgaagaaggtgcggtgaatccatttgagcgtctggtggagaggtggctgacgtcagggcctcgctctctaatgaagcattgccacagggcccaccttcgggttgagcctcccgtacggctcttcgtccttgggcttgaagactgcgacgcaggccttggtctcgttgcgggcaaagtaggagccgctcgagcctttggcaatccgcaccggctggacgccatgcgcgacagcgagcttgacgctctcgacaatcaaccggaattcggccggcgttggcggagggtcggcgccatgaatcagaggcggaggcgatgcctgccatagggattgaagatcggtaggttagtcgacaagacagacatgccggcaggggtcgagcgccgccgctgaaagcgcagcaggcccgcccgacggctgacagaacgggctgcgagatgagacgcaccaagccacccctgccaaagacgctgccggcgagctccttgggcttgtccgaagctgcagaaagccctccagctgggctttggcccttgctgagccgaagcttccagcgccgccagccgtcgtggatggtgctgaggtcgacgaagctcgacctcgaggccggccgtttgccccgatgggccgagaccggtctgggcagggtggccgaagaagtcccgtacgagctctgctgctcatactgagagagtaatggagtcgtcgacatgctcctggcggcgcaacaagagaggccggcaacggaggcgggctgagcggaagaaggacgggaaggagcccgtgctaactgtcagctcaagctcggacgactgagcccggggcgaaaaatagcacccggcggatgcagaacgcactgaaggagagcaggtgcagatagagagaggctctggtcgagctggcgaggctggagctaccgagcgtccaagatgcgagctcgacagaaggcgaggcaggcagatgaggccgtcgaccggtcggaccttgcaaggcgattggcgagcgagcttcgtctgtgacgcgcggctctgtcgtactgctgatcagccggccgcgagaagaaagcggggcgggtgagccggcgagatggcagaaatggagcgagtcgaggtcgatagagtagccaaagggggttgcgaggagggcgacgagcctgcgcgcagccggaatcggaggagcaggcaggcgttcgtcgtcgcgcccaccacacccacttgcatcgagcgacacctcgcagagtcggaaaaagtcatctctaggtacagaagcgggacggagatgaagcagacgaagatcggtcggcagagatcgcctgcgcatcaagcgaggtaaagcgtctcgaggaaggcccgggcgacctgcgggatcatcgcggtgccgacagggctcgtgccgagaccataaagggcgaccatctggccctcctcggccttcttgccatccctagcgtcggcgggatcggcggcgagggcggcggccttctcggcaacgagttctgagacaacggcctcgaggtccaagacgagcgcctcggcgtcagtgagcgtctggaggaaaggagtaacaatgagggatgagcaacggggacggtgacagaaggcagagagagggccacttacggtgcaggcaatgtggagcgcggcggggccctcgagcgcgttgaggtgccagcggcctgcaaaagaaagagccgatcagtctggccgactcccgatcgagcatgcaaagcaggaaagtagaacgcacgcttcgacatccggtcgccgacgacgtacatgttaagcgtcttgctcgagaaggcgacaaccgacgcgaccgggtcgccaaggacgtagaggtgctcgctcaagatcggcgaggttgactggacggccgacttgatgcgctgggccgagcccatgatcttcttgcacgattcaatgtagccactgcggcgagacgggcaagcgaggatgaaaagtcagcgaaagcgccgcacctggacagagcagggtctcaaggacgcacctctcccccttggagaccataacggcccaagcgccggcaatgagtgcgcccggccgggaaccggcgagcgtcgggctcgcgtacagcccgcccttccagccggggaggacgtagaattggtacgaccgccagacggcatcgcgccacatcaggacggacgagcccttgggcgcaaagccatacttgtgcgtgtcgcacgagacctggggcaaacagtcagtgccaaccccttcaccggtcccggtctgaggttctgatgacctaccgaggtgacaccgggaacagagaagtcgaagttgggcgcaggcaggccagccttcctaaggaaggggacgatgaacgagccgaggcagccgtcaacgtgcaggccgagctgacacaaggagagttagtaaggtcagcgagatccgagcgtaactctttcccctgccggcgcaccttgtacttgagcgcgagcttgccgagcgcagggatgtcgtcgatgatgccgtcagggaagttgggcgcgctaagttgaaaaggaacggcgtcagtacgcaacacataggtgcagagaaggctagtgtggacggacctgccgacgaccatgatcgtgttagggttgatggcccgcttgacgaggtcgagccggacacgacgcgtattcgggtcgacgggaaccgagtgtagtttgatgccaaagtagtcagatgcctggcggagcaaggagcaggcacacattagcagctgttctagcacacatgtcaaatccctgtcgcgccccaccttccagaacgctgcgtggctcgactcggggacgatcatctcgggccgcgtgattgacttgacggccttggcccaatcgcggtacgtcttgcaggcaacgaggatcgactcggtcccgcccgacgtcgtcgttccggcgccggccgggttgttccacatggtgaggaccatcgatacctgttgcagggaggagagggcgggagggaagagagcaccaagagagcacggtcagcccggttgcgcgcgcagcaacagccagccagacagctggaaggggttgccccaaccggcaaagcgagtaacgcacgacttcggcctccatcttgcgcacggccggaaagacgtctgggtggagcgggttcgagatcgagaagagccggtaggcctcgttggcaatctcgtcgacctcctggacgtcgtgatagacggcaccgctgacgcggccctcggcccagtccgtcttgccatccttctggccaaggaggacgagcttgccgagctcttcgctcagctcggaccggctcaagccggcagcagggaggacgacatcccgccggagctgcgggtaaggtggcgcgagcttggccgagagtgaggcccggagcgtcgacagctccgactcaacctgccggcgcgacgacggcaggcgaaggagcaggccgacgacgaaccgctggagacgacagtagacctcgtgaccgctgccaatctgcgagtgcaaaggacgatcagcacctgtggcggaggcgacatcggtcggctcgaggccgccagagtggaggcgagggaaggcgacgtacgaggcccctcgcccggacgtgccggtacgaggcgaggatgactcgcgtccagagtaggtagagcaggaccgcattcttgagctgagatagccgctgcggcgaaagagagggaagtgtgggcggcatggtaggcttagggaggagaaggaggatggtggacgtcgagaagtcggagggagggcagtttggaggcggaccttcttgcggctgcgccgaagagacggctgcggcgacggcgaagccgaaggccgctccgtccaaccgacgcccacgccgctcgatcagcatcttggggcagacctacagggcgtgcgctgacgctcgtcgaagtgatcgcactgactggcttccgtcgctgatgtcgttcttcgggcaggctcgctagctaacctgtcgtttgcaacaacctgtcgatcccggcctgcacctagtgcccgacgtgccgtcctcggccgcgacgtcttcctttccggtcagctggcaggaaacgagatcgggcaggccctcctgttgaaagacctgctgccggcaccacgtcgacgacgaacgcaggtcgactctcctctcccggtcgcacgccaggtgcgctcctgtcgtcgctcgaccctcagcactcgtcaccatcgccgactctactcgaccgcccgctcggcgacagatgcaggacgaacccctgcaatggggagatggtcagccgaggatgaccgttggtcggcacgctcccaatcgtcagcgccatctacgaggatgccgctcaggtccggctcgtgcgcgtaatcggacacccatcctccatgctgtcaattcagcaagtttcttcgcctcaaaaggtccccatcgcgcatcaaggcgacggacctgcccctggacccgaatttggctgctctgaccgaagtttctcagacggcgaggagggttcgtgcgacaccctccgcacgtcctggacggagtgatacatatcctctctttcttcctcgcccacgttcctgctgggtccagcagaataagcagggaccaggcccgggagtagttcatcactttacgccgaaaaggagccttggccctggcgcgtgtttgcgcctgttgaccgcgcgggcggcggcggcggggcacgagttcccttcccctccgacagttgcccttcctccgcaacccccctccttgcgcccttcctccatcctccgtagccttacctttccgaagcctgctcgtaccggcttgcttcgacgctctttcttaccctcgcgccggctcttatgtcgacgcctgctgccattccttcgaccggctctgctgccgccgccgcctccgagggctcgacctcgccggccggcgcatcagccaacgaccccgctccggcagcctcgggcggctcgcctgccacctttctcaccgctccggctgagctgcccgagcacgacgcgtcggcaccggccagcgacattatggcgagcctcggcgctccgataggcaccggcagctcgacggccgaggagtacccggccgtccgctcgggaggagagcagccgacccctctcgcaacgactgatgtcgcgacgaccgacgcatccacaccggcagcggccctgccggccgacgagaggacgccagcgacgactgctctccctacggcgacgacctcgacctcaacggccgccacttcagacgtcaaggcggctacggcggccgtgccgagctcatctcccaagccggccgcgtcctcgtcggcacccgccgccgcccggccgaccgcatccaccgctggcgagacgtcccggcctggtcaaaagaagactaagaagggcggcctcgccggcttcctcgcctctgtcttcccgtgcttcccgtccgacgacaaggcgtacgacggggctgccaagaagccggctgcgagcgccgctcacaccccgccggcgccgacggtcgcaacctctgcggcgtcgacaatggcgagcgagaaggcggcggcggcagccaaagcatctaaagcctcgaccgcaagctcagagaagcttcagggcgagccgctccggcaaatcacatcgcgcgagctcatggcggttgatacgacgccccctgcagccgccgggcgcgacaagacgcccaagccggcggccatcgcgctcccggtgccgacgatgccactgacggccaagcggtcgactagcagcctgaaagctggcggcgacgtcgtcatcccgcctcccacgccgacgagcccgccgatcgacgaggtcagtccgtggcgagagatgggccgccctcaaaacgctgggttgactgaccccccccctccatttcgccctcgaccagaccgccggcttgacgtctgcagccgtcgtcccgcccggctcgggctcgctcattcactcgcatgcccacccctcgcagtcgtcgtctcacgcgccgacgccgacggcaaccacgccgcagctcgcagcgaccgacgctgtcggctcgcccgacgagtcgttctcggcgaccgactctgaggtctctggctccgacgccggcggccagcgctacgaagactcgcagaccgagggcggcgagctctaccaccacgatgatgacgaggaggaagaggacgaagacgcgcacctgctcggcggcgtcggcatccccatcggcccagacggcaaggagtgtccgctcctcccgccgatgtcggccgctcacaagggacgcaagtgcctcgtgctcgacctcgacgagacgctcctgcactcgtcgtttaaggtgcgccccttacgcggcgcctctcgttcgttttcagcttggattccgctcgactgaccagcccctcctttctgtcctcaccagctcatccctcaggccgactacatcgttcccgttgagatcgagtcgcagacgcacaacgtctacgtcattaagcggccgggcgtcgacaactttctcaagcggatgggcgagatctacgaggttgtggtatttacggcctcgctctcaaagtatgccgacccggtgctcgacatgctcgacgtccaccacgtcgtcagccaccggcttttccgcgagagctgttacaaccacaagggcaactatgtcaaggtgcgtccgctcgtctggggtctgcgcggaccgtcagctgacccctagacccccccccccttcctttctcaggacctgtcgcagctcggccggccgatcgacgagacgattatcatcgacaactcgccggcgtcctacatctttcacccgaacaacgccgttcccgtctcgacctggttcaacgacccgcacgactcggagctgaacgacctcattcttttcctcgccgacctcgccaacgtcgaggacgtccgcggcgtgctcgacggcggactttgaggcgcgagccgacgtgcatatccgccacgacggcgggccggtcacgctcatccggccgaggactcaatgctcttggaggctcgctgcgtaacggagaggcgccgcgctctcgcccgagtccaggcaaccccgccatgcgttgcgggccatcgaccagcgtcgtcttctcgacaattcggcgccccttcgccggagaaggaggaggagcgatggcggcggcgggcggcggggggaataggtcagcgccggcaatcccgtttccctgccgaccccgacaacggccctggacagcacggacaagactgatcctcttgagactctggctgctctcatgatcgatggtggtcgtcgacaggcaggaagggggggcgacagggcgaagcaggcgggcgcagcagccaagcgacctgcgcctcgggattcggtcaaatcgcatgtaccccttgcctgggaacgtctcctctccgctgaccgtcgcgcgacaagaagatacaaggactttgtcatacaggagcccgggctgccggggtctacgatactcttttgcaggacacgagcgagacgtacaacttaccggaggagcgagagtgccgataacttgagcgtgatcgagtcgacaacgtgctcggtgtcggcgtagccgaggacggatgacatctcgctcctgcaaagcgacaagggagatagtcagcgaccaagcgaggcagagagcgggccggacgacgaggacgcgcgtcttgagccccttgatacggtcaatctcggacgagttgtagtggacctggcccttgccgacctcgacgtactcccactcgtcgccggaggcatcagcaccggttgacgcaggcgcgaccggcttgatcgtctcgcgcgagttggacgactcgagctttggccgctcggcctcggcctgcgacgacgtcgcgacgtgcagcgcctcgacgccagccgagagtgcggcaaagagcgaggcggccgccgacgacgccaaggcggccgacgagtctgggccggacgaggtggaggccgtcgactgcgagagcggcggatcgagcgagacgatcgagcttgaaagcgaggccgcggcgttgagcctcggcgtgccaggcgcggtcagcaaccgaggcgaggtcggctgcgtttggatgctcggcgtcgtcgcgatcgtcgtctcgccgctcgtcgagccgcccaccgacgtcgagggcgcagggtcaaaggcgccgctccgtcgccgctcatcgctcgagttggaccggggctggcgcgagcggtccttccggaggcggacgatgacccggacggcctgcaagctcgcaaacgagccctcgaccttgaggacgcccgctggaaggagccggccaccgctttcgcgccgggtgagcgcctggaacgcgccttggtcaatcgtgatggcgccggccgagtggaggccgtgcaggatccaccacttacggctgcagggggacggccggttggtcagcgagagtcgacctgcgtattcggctgttagcactagccgggacgcactcgttcagcgggttctccatcgggatgaatcgggtgtgggccggcagccgggcctcgtcctcttccgtccagacgccctcggcagcagctggtgcgccgtccgcccgggcgccgacggccatcgcgacgatcggaaagacgctcgcgatattcttcgagttgaggatgacggtcgtcacgccggcgccggtcgcgagctcggccgcgatgattttggtctccatcccgccagtgccgagcgaggtgccgagcgtcgccgtgctgactgcaggtagcagacaaggcagcgcaccagtgcagcgggtcagtcatggcgacaggaacagcccgagggcgaagcgacgacccgcacccgtcttgcgaacttcggcaatgtccttgacgacgcggaccgccttggcgtcggggttcttgcgcgggttgtcggtataaaggcagtcgacgtcggtcatcaggaagagatagtcggcgtggaccatgttggacgtgatggctgagagcgtgtcgttgtcaccgaacttgatctcctgcgaaggaggtcgtcccgaagcagaggtcgagcattagcgtcggcttccctctcgttcaaacgccaaccgaaagggctacgcaccgagaccgagatcgtgtcgttctcattgacgatcggcacgacgcccatgctcaggagctccgtcagcgtgttgacggcgttcaagtagcgcgtccgatccgagatgtcgcctcgggtgaggagaatctgggcgatcggctgcgagagctgcgaaaagaggttgtcccaaagggcaatcaatcggccctgaccaatggcagcaagcgcctggggcagcaggaagaaacatggtcggcgtgtcagccttgtcgcaaggactcggaggaagcgggcaaggcgggagccgagcgagcgagtaagcaagccgacgtacctgcttgccggcgagccccttgccccgctcacggacgcccatgcgcttcataccgacgccgatcgcgcccgagctgacgaggacgacccggtggccctgcgcccggagcgcgcagatggtctcgacgatggacgatagcagcgacagcagcggctggtgcgtctcggggtggatgatgctcgaggtgccgagcttgatgacgatcgtcagcgacgacggcgggccggcatggaaagggttgcgcatcgctagcgggcgtgcggaccaggatctggcgtcctgggagggcaggaaggtcgagcaagaaggaaggtcgtcgtcgtccgagggagagaaagaagtgactccgacctgtcgaagacgggcaggccgagggcgctcccgccttcctccttaaccacaacctcgggccgccgctctctctcatccagacccgaatggcgcttccgtcgctcgcgtgagtctacagccgagcatacgcccgcccccagacgtctgccgtccgaggctgaacgcgagccagcaccgtcctccctctccgccgccgctgtcgccggtcgtcctctcctcctctctctcgcgctcgccgttgtctaccggccagcctcccgcaccccttctcgtccatccgctatagggccgagaggcgccatggtcgacctccgctgcccagcatgcgactcggccaacgtccacagctctggcctttcgggcgaggccgtctgcgaggactgcgggacgctcgtcgacgacaacggtaccctcctcgtccaccggcagctcgacgaggacgcgtcgaccttctttgccggcacccagcgcatcggtcaggacggccggacagctgtcggaggtgctcctcgtggaaagggcgtccagcagagccagatcaataaggagcgccgcgaggtacgtccccggttcgcctctcccgctgccgccgctcaggctccctgcttcgctggccggcccagctgcgcggcgacaacactgaggactgacggtctcccgccttcccctgttgcacagcgagaggccaagatctttctcgcgtcgctcggccgctacttccaggcgtccaacgtcgtcgacagggcgctccacttctacctgatcgccgcccgggaccggccgacgagcgagcgccagaccgtcatcctcgcgacggccgcctttgcgctcagcatgaaggaacgctcgcgggccgagacactgcggcaattctgcgtgcgtttggatcgccttcctgctctgcctttccgccaggaccttacgctgactcgctcccttgacctgcagcacttcaccgaccagcgggtcctgccggtgacgcgcatgtatctcaagctgcggcagacgacgggcgccaaggtcgccgagacggatccctcggtctttgtcgagcagcttctcgtccacctctcggccatctgcgccgactcgaacaagggcctgacggtcgccaagtggctcgccaagggccgcggcaacacggccggcacgcttcgattcctgcaggagacggacctccgccaggtgcgcgagacggcgctcgcgctcgccgagtgggtccactcgatcgacctctttgtcggccggcacgccgtcagcgttgccattggcctcgtcttgatggcgatcgagggcacacgccagatcaagcttccaaaggtcgtagacgtcgccgacgagcttgcaaaggctaacggcgtcgcggcctggacgagcatggagcgctaccgcgagacggcccgggccctgcttgactggagcgagcacctgcccgggatcgacctcaacgtccggacgctaacggtcaacgagcttaccggctggaagaaccgtgccgtctgtaagcgcaaggaggtcgcctcgctcgtgcttgacgtcctcgaccagcaggcgacgatccgtacgcagcggcgcgagctcgggctcgaggtcggctgctctggcggcgccgtcgccgaccggccgccgctcacgtttgccgagtttgtcaagctcgagcaagcgcaggaaggggcgggcgatgtcaaggacattggcgcctggggtgccaacgcggcctcgggggccgccgctcttccgctgccgacctgggacgacctcgacgagagcgaagcgccagacatcggcgagcctcgcgctatcgagctcgcaccgacgcccgggctgccgccgtcggcccagcagctggccatcccgaccgatagctaccatgtggaggcgccgcccccgtttaccgctcattcgccggtctttgacgctgtcgacggcgcaggactcgacgcccttccgatgccggacccgttcgacatgggcgtcgcgcttgacccgccgccattgtcgccgggccagtcgcagcccgagctcgacgacacggccttcttccagtcggcggcgccctcggccttcctcccgcctccgcttgactcgttcgcagacgagggctcgttcgctggccccatgtcggcggcctaccacgacgactccggcgctgcgacggcctacggtgataccgctgactcgagcctcatggacccgtcacttctcgccgacgtcgtaccggagccctttggcgggacggcgtgcccggccgcaacctcgcacggccagtcgtccggcctgtcgagcgtcagctcggccgaggtcgtcgccagtcccgacggagtgcccaaggacgcacccgaccccgcggtcccgcagtctgaggcatcggtcgtcgcgtccgaggctgcgcccatcctcgtgacgccgtcgttcaagcccaatcatctcggctcgaagcatctccggccggcggcctacatgcgctaccggccgacggccgcggaccgccagcgctcgctctggctctcgcaggacgtgatcaatgccgtccggacgaccggcaacgacacgacggcgctcggcaagctcctctgcgccggcctcaacgcaaatgacctcccggccttcctcgcgccgacgtcgacgctcggcgcggtcgccgccctccgccagggcgggagtctcgcgatcgatgacgacgagctctttgccgatggcgagctcgacgcttacgtccggcccgatacggagcgcgagtttttgctcgagctttgggagaaggacggcacgtcacgcgagatggacgaggccgcgaccaaatcggttgtccgcgaggaggccctccgcaagaaggctgcccggaaacggacgcgcgtctcgaccaaactctcgtcgtcgtcgcaatacgccggcagtcgacggaccaaggccaagcagggcctcgatgccgatgcgattgcgctcttgctcggcgaaagcgggtcggcacacgccggcggcggtggcggcagcaagggcgacgacgacgtgcacgacgacgacgacggctcgcaggccggcaccggcagcaaactcgacgcgctcgtcgaagagttcggcgagccgaccgacgacgaggcgaattggaaggccgatgtcgacgacgacgacagcagcgaggacgacaacgacggcgctcggtccgtcgcgggcaagaagcgggcgcgtgccgggccacaggacgaggccgacctcacgaccttcttcaagcgcgcgcgagtcctctacgatgacgccgagggcgcggacgacgacgaggccggcgaggaggtctgagcggctgcgtcgtcaagagggagcaggggttccgtcctcctccagttgtatcaccccacatctagcaaacacgaagtcctttacgatcatcccacatgccctcattctccgacaccctttctctcgacgacctctcttatgactgactctctttgatccagttggccgggcggaacggcgttcgggccgggagggcgagctgcgcgcgccggcccttcgaagccctcccttctttctctccatctcgtcgcctgctgacgaccaccatctctcgtcccacgcgtcccacgacacaagcacgagccctcagctctctcctactccttccctgtacgcgctctgcctccgccatgcacgcagtcagactgaggcagtcgcactgacgagcgagctctttcgcctggccgccgccccctttgatctcccggctgcatctgcccacgtccgaccatcaggcttctacgcacgccccaacaggtcgtccgactttcattcgcgactcattcaagtgcgcaggcttttctcgtacgtgctctgctagcagcgacctcacatcgccggacgtggagactgaccaggggtcgtgcgttgggtcggtcgcttcacagtcccgcccctctccctcgacccctctccaccgtcgcggcctccgcccagcatgggttccgtcaagcgcaagtcgacccccaacgaggcctctaccgaagcaactaagcgcagcaaagtcgagtcggtcagtctaggagcgagcttcgtcctcagccggccgcgcctgacccctttctttcactccttcctccccctgtaagtcacccgagaggccgacgcccgacaagaccgacaccgccgcctccctcacgtcaactcagaaggccaaagttggcgagaaggctcgtctggccgcgcgcgagaaggcggccgaggagaagaaggaggaggccaagaaaatgcttgaccagctcatcgccgagcagaagctgaaggctgccggcttcgccggcggaaagacgacttcggctgctgcgaaggccagggcgcagagtgtcgcaaaggcgtcgtcgtcggctcacagggaccatgcgaaggagcagagcaagcagacgacgtcgtcgaccgctgggtccgtctcgctggccaagtcggacgctcccgctccggcgacggccaaagcgtcgtcgtcctcgtcttccaagggcccaaacgtcgtcgacgcttcgttccccaagctggcagctgagcctaaccttgatggcggcgcgacggccggcgtcctgacgttcaagactgcctcggcaaccgacgtcaagcacaagcgcgggcgcaaggcgttcaaaaagtcggccgaagaggcgacgcgcctgcggggattgacggtccagtcggtcaagtggctcgaggaccgggctggggcgagggtccgctggtcacggccggccgaggaggaggaggacgagatcgaagacgaggacgaggacgaggagcaggagaatgaggacgagggcgaggtggacgtcgtctactcgagcgtcgccgacggcgagacccaggcggccatgcagcctgctagtcccgaggttattgatgcatccgaggatgcctccgaggacgccttcgaggtcgacgccaacaacgacgccgcaacgcccaagccggacgacggtatcgaggctgaggacgcggacaaagatgccgaggctggccagaacgagccgcgcgtgacccaacaggccgagcgctcgaccgtcgccgccttcacgccagccgatttcaacgccctcttcgagcgcgacgacaaggtcgtcacctcgtccgacaaagcctggtcgcacgtcgcctttgacgtctcgctcctgctccacgtcgtcgaggagcggttcgaagacgacgatgaaaagaaggcgcgcgtccgcgagcatctcgacgccatttcgacgctggtcgacatagtcggcgcgaaggccgaagtggacgagctcgaagacggcgggttcgaggtcgagggcaagggccagctcaagacggacgacggacagaacgacgacgccgttgaggaccaggacgagggcatctttgccgtcgtcgagggcagcagcgactaagtcgcccgtcgcgaccctccctgtcatcggcctcgccggaacccacttcccatcctccaagcacccatgcccgaccctccatcttctcatcttccgccctttctcccttccctctgtgccctgcgtgctgccgcggccgtacgcccgaggctcggccggctccgagcgcccaaaaacatcgaacgactgcttttttttttctcggcggacgagcgcgcgcaggcgggctgaagcctgaaggggaaacgcgtccttcgaaacgaagctgacctgtaccagctcacagcaacgccctccttccttctctgacttacgagcgagaatggccgtccgaacctcctctccctcgacgaactgcaagtcgtgcagctgtgactgcagccggccgaagccctctcgcgcggcattctgggccaaggtcgcgctcgtgctcgccgtcctgacgggggccttcaccttccttgacggcatcaaggtcggttcccttcctcctgtctctcgctcgagagagctccctcgctgactgcgtcctctgtgcgccttaaaggagcgctggtacattttcgagcacacctcgatgcatgccctgacgaaagaggccgtcgccctctacccgaacgaccttccctcgatgctctccttcatcacctcgtcactcgccgcccagcacccgtcctggacgatcaacaccgactttgacgacccggccaagtgggtgttcaacaatgcgggcggggcgatgggctcgatgtttatcatccacgcctcggtgaccgagtatctgatcgtctttgggacggcggtcgggaccgagggccactcgggacggcacacggccgacgactactttaacatcatccagggcgagcagtgggcttacctgccgggcgcgctcgagaaggaggtgcgtcgccgatcgcctgcgtggatgttttgagttgcttcctgactcgcgagactgacgccctacctctatcgcccttcaggtctaccccgccggcagcgtccaccacatgaagcgcggcgaggtcaagcagtacagtgcgtgcccgtccctctcgcaacttcatcaagcgattccctcctgaccctcccttctccgtcccctttccttcttccttcctaccctcttctctcctaacccccttctctgcctctcccatccccccttctctccttcaactctttttcatgttgcagacatgttgcagacatttggaaggagagagtctaggaaggagggcgttttcgtctgatcagattttgtgcccttttatagatgtcaaagtggtataaaagagggaccgacgcaattccaccgtgtagagaccgaccgaccgactttcctagactctcatagtgtcttgctactagtgtgcgtcgctagccgggcacttatggagattgttcccccgtacgcaccccaagtgcacccgggctaccccccgtatctaggtacctttggccggctagcgggttaccatgatcaccaaatgacctcgcgtccgagacttgaggttttggatagtatctctttcgaacggttttgtcagagcaggacgtcgtgacggcgatttcacggcaaaggccgaaaaacagccgacttacaccaaggtgcacttgaccttatccgggccggacgccgcccatcttacccgttggtcttcagacctggcagggacctcggcctagactatcaacatcgatccctgacttcggtttggtcactgccggtgattcaagaaataggtcaaggaggacaaggtaagttgcatgttctgcctaacatttacacatgacaccccagtccaaatacctttcaccgaaccgattcttgcaaactaagaccctacttagagcgctagattagggctttctaatgcgctcggtcgcgtatcaagcggatgaaaactcgagggggtccccctaagcacgaccagtagaccccctcgtttacctacctaccacaaggcaacctcataccgaatgactttgttccacccccctgaaccccctctacaatagcgcttggttgcccgcaccgaacgcgcacatttatatttcggtcggtggccgagtggtcgagcaagcgaggtcgaaagtcaaacgaaatcgagaagaaagattagttggctgccgatttgaacacgtgtcctttgccacctaaaagcggcgccttaagtggcgcgttttagtagtatgtttgacctttgggtaggtagggtgtcaggccagtcaacatgtacccaaaacgacttttgttacctatatgaagacaggaagcgaaagctaaaacctacttctgcatcactactgaatagcttcgggcgaaaagttggtgcgagcaagtcagtaccttcggggatggctcggtcaaaactgcaatcttaattatcaagctgtcgattggcctcgggagtctagctttagctgggcgcctttgagatgttccgaaccggtttgtgattaagaaagcgattgatgcaagtgtctgcaaaccagcgcttttccgatcaaaccaagtcctattgctctgcagtaggcaatgattagtcgtgtggattacttcccaatggggtgatctcttgcaattaattcatcggggatccgttaggatgtgactgctgctctcaaaagccggtccattttaatcgtcctcactttggagcctgaattgagtcgtacctgagtctatggacgaggtgtgcgactcgacgactggtttcagagctagtaagaaccgggggataaggcagtcattgaagcgactaggtatccagatgtcccgcaagggaataattggtaccttgagtttccttgacttgtaacattggttatcaccattttaacgaacacctaagccaagggggttgcttgattgcgattctcgaggcggtcagacttaattgtctggctcaactggaatagttacctggttgatcctgccagtagtcatatgcttgtctcaaagattaagccatgcatgtctaagtataaacaaattcatactgtgaaactgcgaatggctcattaaatcagttatagtttatttgatggtaccttactacatggataactgtggtaattctagagctaatacatgctgaaaagccccgacttctggaaggggtgtatttattagataaaaaaccaacgcaggcaactgctcccttggtgattcataataacttctcgaatcgtatgaccttgtgtcgacgatgcttcattcaaatatctgccctatcaactttcgatggtaggatagaggcctaccatggtttcaacgggtaacggggaataagggttcgattccggagagggagcctgagaaacggctaccacatccaaggaaggcagcaggcgcgcaaattacccaatcccgacacggggaggtagtgacaataaataacaatatagggctctatgggtcttataattggaatgagtacaatttaaatcccttaacgaggaacaattggagggcaagtctggtgccagcagccgcggtaattccagctccaatagcgtatattaaagttgttgcagttaaaaagctcgtagttgaacttcaggtctggtgggccggtccgcctcacggtgtgtactggtcgactggaccttacctcttggtgagccgtcatgccgtttattcggtgtggcggggaaccaggacttttactttgaaaaaattagagtgttcaaagcaggcctatgcccgaatacattagcatggaataatagaataggacgtgcggttctattttgttggtttctaggatcgccgtaatgattaatagggatagttgggggcattagtattcagtcgctagaggtgaaattcttggattgactgaagactaactactgcgaaagcatttgccaaggatgttttcattaatcaagaacgaaggttaggggatcgaaaacgattagataccgttgtagtcttaacagtaaactatgccgactagggatcgggcgatgttcttcttttgactcgctcggcaccttacgagaaatcaaagtctttgggttctggggggagtatggtcgcaaggctgaaacttaaaggaattgacggaagggcaccaccaggagtggagcctgcggcttaatttgactcaacacggggaaactcaccaggtccagacaatataaggattgacagattgatagctctttcttgatttattgggtggtggtgcatggccgttcttagttggtggagtgatttgtctggttaattccgataacgaacgagaccttaacctgctaaatagcccggctggctttggctggtcgctggcttcttagagggactatctgtgtttagcagatggaagtttgaggcaataacaggtctgtgatgcccttagatgttctgggccgcacgcgcgctacactgacagagccagcgagttttttccttgtccggaaggtctgggtaatcttgtgaaactctgtcgtgctggggatagagcattgcaattcttgctcttcaacgaggaattcctagtaagcgcaagtcatcagcttgcgttgattacgtccctgccctttgtacacaccgcccgtcgctactaccgattgaatggcttagtgaggtttccggattggctttgaggagctggcaacggcaccttgtcgccgagaagttacccaaacttggtcatttagaggaagtaaaagtcgtaacaaggtttccgtaggtgaacctgcggaaggatcactaaagtaaacgccctccggggctctctttaattcacacacccctgtgcactttggccacctgccgcgctttactgcgttagtaggtgtgtctttttaactatacactatatacacaagtcattgaatgtaaaatcgttataaactaatataactttcaacaacggatctcttggttctcgcatcgatgaagaacgcagcgaattgcgataagtaatgtgaattgcagaattcagtgaatcatcgaatctttgaacgcatcttgcgctctttggtattccgaagagcatgcctgtttgagtgtcatgaaactctcacctccagccttctttaattagaggtgttggggcgtggacgtgagtgctgctggtgccctagttgcatcggctcacttgaaatacattagctgaatcctctagaggtggttctactcgacgtgataagatctccgtcgaggacagtgcaacttgttgtgctggccgccgctagctgttgatacgcttctaattagcgcagacttcgagtgctggcaacttttgacaacttggcctcaaatcaggtaggactacccactgaacttaagcatatcaataagtggaggaaaagaaactaacaaggattcccctagtaacggcgagtgaagcgggaagagctcaaatttaaaatctggcaggctacgcttgtccgaattgtaatctcgagaagtgttttccgcgttggcctgtgtacaagtcccttggaacagggcgtcatagagggtgagaatcccgtccttgacacagatacccaatgctttgtgatacactctcaatgagtcgagttgtttgggaatgcagctcaaaatgggtggtaaattccatctaaagctaaatactggcgagagaccgatagcgaacaagtaccgtgagggaaagatgaaaagcactttggaaagagagtcaaacagtacgtgaaattgttgaaagggaaacgattgaagtcagtcgtgcctgcctagtctcagccttttggtgtactactaggccggcaggtcagcatcagtttgggaggattaacaagggagttaggaatgtggcaacctcggttgtgttatagcctagcttcgcattgatcttgctggactgaggaacgcagtgcgcccgcaagggttggtcttcggacacattcgcacttaggatgctggcataatggctttaaacgacccgtcttgaaacacggaccaaggagtctaacatgtttgcgagtctttgggtggaaaacccatgggcgtaattaatgtaaatgcaggtgggatgcgcaagcagcaccatcgaccgatctggatcatttatgtgatggatttgagtaagagcacatatgttgggacccgaaagatggtgaactatgcctgaatagggcgaagccagaggaaactctggtggaggctcgtagcgattctgacgtgcaaatcgatcgtcaaatttgggtataggggcgaaagactaatcgaaccatctagtagctggttcctgccgaagtttccctcaggatagcagaaactcgcatcagttttatgaggtaaagcgaatgattagaggccttggggatgtaacatccttaacctattctcaaactttaaatatgtaagaagccctcttcacttaattggaagtgggcatgcgaatgagagtttctagtgggccatttttggtaagcagaactggcgatgcgggatgaaccgatcgcgaggttaaggtgccggaatacacgctcatcagacaccacaaaaggtgttagttcatctagacagcaggacggtggccatggaagtcggaatccgctaaggagtgtgtaacaactcacctgccgaatgaactagccctgaaaatggatggcgctcaagcgtgttacccatacctcgccgtcagcgttaatgtgatgcgctgacgagtaggcaggcgtggagatttgtgaagaagccttggcagtgatgctgggtgaaacagtctctagtgcagatcttggtggtagtagcaaatattcaagtgagaaccttgaagactgaagtggagaaaggttccatggtaacagcagttggacatgggttagtcgatcctaagagatagggaaactccgttttaaagcgtgcacttgtttgcaccactatcgaaagggaatccggttaagattccggaaccagaatgtggatctttgacggtaacgtaaatgaagttggagacactggcaggagccctgggaagagttctcttttctccttaaccgcctacaaccttgaaatcggattatccggagctaaggtcgaatggtgggtagagctcagcacttgtgctgggtccggtgcgttcttgacagtccttgaaaatccaacggaacgcataactttcacgtctggtcgtactcataaccgcagcaggtctccaaggtgaacagcctctagttgatagaacaatgtagataagggaagtcggcaaaatagatccgtaacttcgggataaggattggctctaagggttgggtgcgtcgggctattgcttgcagcttcggattctggacggcactactctgggcaactggggcggagctgtctggagactgaggtgaatggctttagctgccttcgggcgtctggcgtacgattaacaaccaacttagaactggtacggacaaggggaatctgactgtctaattaaaacatagcattgcgatggccagaaagtggtgttgacgcaatgtgatttctgcccagtgctctgaatgtcaaagtgaagaaattcaaccaagcgcgggtaaacggcgggagtaactatgactctcttaaggtagccaaatgcctcgtcatctaattagtgacgcgcatgaatggattaacgagattcccactgtccctatctactatctagcgaaaccacagccaagggaacgggcttggcagaatcagcggggaaagaagaccctgttgagcttgactctagtttgacattgtgaaaagacatagggggtgtagaataagtgggagcttcggcgccggtgaaataccactacccttatcgtctttttacttattcaataaagcggagctaggactaacgtcctaccttttcgtattaaggtcctttacgggctgatccgggttgaagacattgtcaggtggggagtttggctggggcggcacatctgttaaaagataacgcaggtgtcctaagggggactcattgagaacagaaatctcaagtagaacaaaagggtaaaagtccccttgattttgattttcagtgtgaatacaaaccatgaaagtgtggcctatcgatcctttagtccctcggaatttgaggctagaggtgccagaaaagttaccacagggataactggcttgtggcagccaagcgttcatagcgacgttgctttttgatccttcgatgtcggctcttcctatcataccgaagcagaattcggtaagcgttggattgttcacccactaatagggaacgtgagctgggtttagaccgtcgtgagacaggttagttttaccctactgatggagtgttatcgtaacagtaattgagcgtagtacgagaggaactgctcattcagataattggtctttgcgcctgtccgatcgggcaatggcgcgaagctatcatctgctagattatggctgaacgcctctaagtcagaatctgtactggaaacgatgatgttggtcccgcacatgttagacgtgttacaatagagctttgctcgtgaaccatacctggcagtcctggcccggcgagcggaaatgcttgttgggtcttctgcgaattgaaatttcaatatgggcgggggtgaatcctttgcagacgacttaaattggaacggagtgctgtaagcagtagagtagtcttgttactacgatctgctgaggctaagctcttgttctatagatttgttcaacattgttgaacttttcttgcctcctgcgggcgttcttcagggtcggcttccgacgctgaaagacgcatcgtgcgagggtctcactttgactaggggctcgatcagggacgccagagtgcagctcggtcggggttggattccaagggattcagtttccttgttaattcggccttgatcgagcggcgcgggcggcccgacttggcgggtttttcgctaagtgcgaacggcctcgggccaggctggtctgctttgatttctcatggtgtctactagggcatcattaggaattaagatgggctcagtctggttcgatcaaggtcgtttgcagtgggtaattaagttgattgtagggccctggccgagggcacttggtcgttttccgacggccgagggtctctttcggtggctagacttgggtgcattaattgtgatgcgcatcaggttggttgctggctgggtggctctgattgatcacgattgaaggtgatttaatcagagtcgagcgtgccctgccggggtgggcacttgtcgaaatttcggccaagtgcctggcctggtgcggccttttgcgatcagtttaagtgccgattgcatcaggttatcgagtaaggttagctgtgtgattgagcctgctttctgcgctggtctgtgacttggggcgctgccttttgagactagtttgcatcaggttagggcctaggtcagagtctagtgcgtgttttaatcgcctttctggctggtcttttagactgggtatagagaggggctaggacactttatatcgtcttttattattcagggctagtttgggaaaggcctctggctgggttaggagttgttctgggtggatgttttctgtgggtgaaccctacctacccaaaggttaaacatacttctcagacgtgcgacttagagcgcgagtttgggtggcaaagtacacgcgttcaactgggcagccagctaaacctatgagattttttgaaggaaaaagagggtgaaagtgtggtattgtggtatatgtaagataattaggggaagcttagtatccacggccataggatatcgaaagcaccgcatcccgtccgatctgcgcagttaaccggtatgccgcctagttagtaccacggtgggggaccacgcgggaatcctgggtgctgtggttttgccactcacttgtctttttttttttgctgccggggtcgatgtgtagggttagggtgtagggttagggtagggtcgggtaagtctaggtcggccaggtgtagggtgtagggttagggtaggtcgggaggttgggttagggtcgctatggtcgcctgcgtttagagtcgacttttattctagacggaccaatatttctccgattggtgtcttttcttttgaaagttgcagatatttccgttagtatatcccagttccaagggcgagttgattgggttttatttacagaatctgtgtgaggtcaaagtggtgagagttggggggttagggtcggtacggtggacgacatgagccggttgagagaacggctcgatagatcgatgtcaactctttttcatgttgcagacatgttgcagacatttggaaggagagagtctaggaaggagggcgttttcgtctgatcagattttgtgcccttttatagatgtcaaagtggtataaaagagggaccatccccttcccttcttcttcgcccctcctcctccccctccctccgccggcgggctctccgccccgcgcgggcacgcatgcaccgtgttccaatcgacccgaagctcgcgctcgtccttccactcgacgagcgtcggcatcggctccgagtcgtctggcgccacgcagtggaggtgaatcacgagcgtctgcgacacctggtccgttcccgaggaagtggtcccgcccgacaagcggccgatgagcgtcgcgactttggccgtggagcccttgacggcctcggtcgtcgtcgaccagtcggctttgagcggagcagcacccgcgccgccgtcgtcgtcgaggggctgctggaggatggggacgacgcgaagcgtccgcagcgcaggctcggcgctgggcttgcggttctggacctgaaggcagacgtacgtccctgccgggcactagccggccggcggtagagcgatgtgtcgagcggttagtctgcatgtcgagcggtctggagagagagagagagagtcagagagagaccgtacctcgtcaaccggctcgtacccctcctcgtgcggcagcccagcagcgtcccccccctcctcgccttcaccaccgccgccgcagagcgccatccgcaccctttcaaccatgacgctcgggggtgtctctctttcgcgctcaaacgtctggacggccgcaaggccgctgaggtcgtagtcggccttgccggcatggaacgtgcaggacggcacggcgccgccggcggcgaggacgcaaggagggaggaaaagggacgaggtggagaagaggaggaggagcgcaagcgcccgggaggccgcgaaggtcatggcgttgggcgttgcagcgagctgctgtcttggacgggctgtggttgatgtgcttgagctgtgccagaggaagccagagggtcgccgtcgggcgagacgaggtcgtcgtcgtcgtctcccttgcaaccatctcctcctcgtccgcatcgtcatgtcctctcgccgggtcatcaagctcctctcgcccgctcagctgctcgccctcccgcccaaatcgacagtcccgctcgatgcgtcctggcacagtcggtccctcccttcttcccaccatcgcaccccccccggctggaggcgcaggcacgcatcatcggccggcctgccaaggggttgagtgtctctcgaattaccgacctgacgctgctggccttatcagtgcccggctcgcccatcatcggccgcgaagagtatctcaaggcccggatgtgcgtcctgcctggcgccctcgctcagacgcgagacggctgacccaccgaccgctctgcttccgctctccgccctctaccgacctgctgctgccccccgcatcgctccgcccggcttgactgctcgactcgtcgtgctccgctctgcctggcagaccacacgcccgcttctgggacgttgacgagatcgcctcgtctcatccgctgtgcgtccgtccgcgtgcgacggcccactgcgcatccatcagactgactcgcgacccctcccatccccgatcgcagcggcttgaagcacatgatgccgtcggccgagcagtttgcgagcgcggccggtatgtgtgcagcacgatcgtcgccgtcgaaaaggatgcgattgctgacccccttcgctttcgcgcgaatgccagccgccctcggcatcaggtcagtcgtcgctcttggccgtcggtcgccagcgtcttggaccccgtcgctgaccttccttttgcactttcacccccctttttaagccgcgactcgcacgtcgtcatctacgacgccaagggcctcttcagcgcccctcggtccgtcttccccttccccttcgtcgtcaacccacgtctcgctgatgcctctcgaacctccgaccgacgcccgcaggaccgcctttacgtttgcctcgttcgggcacgagaacgtctcgatccttgacggcggcttcccgcgctggaaagctgaggggcacgaggtcgagtatggctcgccagcgccgttcgaggtgcgacccctcttgccgtgggctagtcccgccagagtcgagcctgacccccctcgccccgccgccctgcacgtcagtccggcttctacccgacgccaagctccgaagcgtccagcaccgtcacgtacgacgcgatcgtcgccaacattgcctcggcccagtcggccgtcctcgacgcccggcccaagccgcgcttcacggccgaggcgcctgagccgagggcgggcttgccgtcgggccatgtccccgggagccggagcttgccatttagcgagctcgtcaaggacggccggctgctttcggacgaggaggttggtctcggccgtccgcttgccccccggacgggttttgccgctcactgaccctggggcccgcttatcgtcactgcagctgaagcacatcctaaacgagcggctcgggccagacgctgacgccgtcttccagggcaagaagcccgtcgtcgccgtgagttcccccgcgctagatctccgatcagcctcgatcgggaaaggctcaccccctccttcttgttgtcctgcacccagacatgcggctccggcatgacagcgagcgtcatctggcttgcgctcaaccggctcggcgtcgacgcccggatctacgacgagagctggtcgggctatgccgcccggcccgagagcgagattgcctctggcgaggcctagagagcgagggggagggtagtgtaattctggaaatgatggcattgggatcatgccgctgccggcgggggcggggcggtcgatgtcgctgaggctggtgcactgctgctgccgagcagccgctggaggtcctcctctgagagggcgccgatcgcctcgtcgaagccgttgtcgaaaccctccatgtcgtcgtcgtcccccgcggcagcagcaacagccggagcagatgccttggcggcctgctcgaccgccgcgagcgcctttgctgccgtcgccgcctcctgggccgcctcgacggcctcggcgccctcgccgcctcgcaagccaaccgggagaagcgtcgcaaacgtcaggtacgacgtgtggcccctcgcctcctggaccggccggctgagcgtcgtcccgtacggcactggctgcccacgcttcttgtgtgtcgggcccttgccgccgccgcctgggccatccttcttcgccggcgcctgccggaggtcaggcgtactcgtccccgtctcgccctcgtcgccctcgtcctcggccttgcgcttccggtcgccggcgagcgccatctgccgctgccggcgctcctccttgcgctcgtcctgctccttgagggtcgcgatcgccgcctggatcggggggacggggacattggttgtcacctcgtggaagcgaagcaagcactcggacatgctgatgtctgtgggcgaggtggcacaggtagggtggttcagacatcagcgcctggcggcccagactggtcgagcaggtcgtcgatgcggcggcgcaccggtaaagccggcggtcgagagagcagtgactgtccgcaggacctgctcgatacacggcgagaagcagcagatgcgcgtaatctcgttcggctacggacgcgcagaatcagcgaaaagggccactgtcggccacgggcgaaacggaacggaccttgagcgcagccttggccgagtcgatcgcctcccagggcgagggcaggtcgaggaacactagatccgggcacacgcgagatgacgatcagtgagtagtctttgaaatgaagggcagacagccaagcatcggtgatcgcacctgcatcggcgacgccctcgagctggaagccctccttgcagacgttccgccacgtgcaggacgcgagcgagtccataccatgctccctgaactcgaccctgcaaatcgcaggagacaaagagcagacgatcagctccaggccgcatgtccgggcaaggggggagagaaggcggcacgcactgagccttctgcgcgcgagtctcgtggaactcgaaactgtgcagccggccatgcgggctgacggtccgcgcgacagcatgcgagaagctcccactaccggtgccagcctcgacgacggtcgagcccggccggaccgaaagctgctgaagaatgagggcgatgtcggccgcgtagaggatctgggtccggtgcgggagagcgagcgtccagagctcgggcgtcgggcggaggagctgtagcgcgtcgtgcgatcggtcagctagcgctctcccctgttgatgggacatcatgcactgacatagacaaagcccttgcccgtgacggacggcacctgggcgagtgcgagagtgagcgggtgcagcgaatgtcagcgtttggccctcgccggctctggcaaggacgcgcaccctgctgccaaagggaacgccgacgagccggtcgtgctcgtacgtgccgaaacggttctgggctttggcgccggcctcgatcatgacgggcacgagcgactcgcggctctgtcggcgcagagtgcgggagggaggaggtggtcgagcacgcgtcgcgtcggggatgtcagtcgggctgctgttgagaagacgccgcgtctcctgcaagcaccaaaggcgccaacgtacgagctgcatgatgacgagatcgccgtaaccgatcagcctgccagccgaggggaagagcgggtaggcagacgttgaggcagaggcctcggcgacaggcagtaaggctgcgaacgacgaggcgaccgggacggaagggatggcctgggaggcaaggacctcggaggtcgacgcgctcagcgggacgacggatgatgaaggcgagaccatcgtgggttgggctaaaggaaggtggtcgctggtcggtcgtgcgaggtacgaacgaggaggagccagctcgacaggagctgctcgagctggactggagcacgggccagcgcgagacagctagggttatgccggccggcaaccgcctgccggcatgcccccccctccttgctccctttgcccggcaaccctcagcagcagcaccgacactcgcaggtcaagcagcggatcctcctttacagctttagacagcatgctcggttcgacgtccacgagcttcggccggtcgcggcgcgcgctcgcctccactgctgccgccgtcgcgtccgccggcacctcgacctcgactgccgccgctctttcgaggagggcagctctcgtcccgagccggcgattgctgacgacgtcggtctcgcggtcgagctaccacccgccgtcatcaggtgcgttgactactcctcttggtcctcctggtggtcagagcctgcctgctcactggtgccccttgccccgcccccccttctcgcccgccagaacccttcgcggctccgccaacgccagcggccagcggcacggcggccagcggctcgtcggctgcccctccgccggtcgcactcaggaggcgaggcaaagtcacactcgccgtcctccagcggttacacgctgcgggcgagcccatcacgatgctgacggcgtacgactatccgacggccctgctactcggctcccacccgtcggtcgacatggtcctcgtcggcgactcgctcgcccaggtcgcgctcggacggccgacgacgacgagcctgacgctcgacgagatgcgccaccacgcgacggccgtcgctaccgcccttgcgccgcatgcggccggcccgctcctcgtcgtcgacctcccctttggctcgtacgagatctcggtcgcgcagggcgtcggctcggccatcacgctcgtcaaggccgccggggccgacatggtcaagatcgagggtggggccgagctcgtcccgctcgtccggaggctcgccgaggttgggattccgtgcatgccgcacatcgggcttacgccgcagcgggcggccgctctctctggcttcaaagtccagggccgaaccgctcagggtgcactcgcactcgtcgacctcgcccgggagctcgagcaagctggtgcgagcgccctcttgctcgaaggcatcccgtcgacgctcggcgcccacatcaccagcgccgtcggcatcccgacgatcggcatcggcgcgggacccgggacgtctggccaagtgctcgtcctctcggacgcgctcggcctcttcccccggccagacgaccagcaggctgccggtaccgccccgcatcagccaagattcgtccggcgcttcgccgaggccggccgggcgatgcgcgagggcattgacgactatgtgcgcgcggtcaagggcggctcgttcccgcatcctgagcgcgaaggttacaagatggccaagggcgagcgagaggccttcctcgctgcgacggcaccaaccccgccatcaggcggatcagattcatgacgcacgacgaccagtttgcgaggaggattgcgattgtaagcgcctccgcgcgtttgtcgtcgagcgccagccgttcgcgtcgcttcagcagcggtcgagtcgacacgaggcttcatgttgtgtgttgagcgaccgtccagacgcgactgccttctcgcgcgcgcgtctcgctctgctccgccgccggcgtcgcctccgtcacccaaccgtcattcctttctccgccccttcccttccctccatcaccgacaggttaccttaagtcccttcagccctcaaaccagcacccatccatccatccgtgggcgcttgtcgcatgttctcccagacggcgacccggcctcgagctgccggcgcgatcgcgagctcctcctcggccaccgctcaacctcagcagacggcgacggctccccgtcgcatcgccatcccggacgagcctgtcagacgagaagagaaggaactctttgatggactcttacagagcgagtccggagctccgacgaccaagacggaagcgtcggcaggtgcggctggcttagactgcgcttcccgcttgcgagcacgagctgatgctgcgtccctccctctgacccatccgcagttctgacgcctgctctgaggtcgaactctcaggtgcgaatccaggcaacctcaatgacagccggcaagcgtcgtgcgccctcctcctcctcgacctcgacgagctcgcaggtgacgctcagcaaaaaggagtacgagcacctgctcgccgttagcggccggtacgagctcaaggcaagcagggccgagcagaagctgaaggaggcgacagtcgagcggtccaaactgcaggaggatgcggagagtgctaggagggaggcccgttgcgtcctgctcttcactctcgccccgctgccgagggtcactggcctgacattgaccttgctccgctcacaggtcataaagaggcagctcttcgcgcttcggtgcgtcagctcgcctccttgaacacactgcgaaggggaagagctgacgcaatccttccttccattggcggctgggcagcttgagaagggggacggcgccgcaaatgacaaggagcagcagcgcagacgggactgcgaaatggcccggcggatcgaggaacttcgccagatccataaggacgacaaggcaaaggttcgccaaggctccttcccttcctcctgctgcacagcccgacgctgatcagcactccggtttatggtgtctctccccgcagtggtcggcacgaatcgccgccctcgagacgcagctcgcgaccgcctcggaccggccagacgcgcagaaagaccgcggccggctcatgcaggcccgcgtcgagtgggatgccgagaagattcagctgttaggcgagatccgcgaggagaagcaagcggcgcgtcgggccgccagggacaaagaagccgtcgagctggagaatgcgaggctgtctgaccgcatcgagtcgctcgacggtcgactcgaagccgccgaagaagcggcgacgctggctcttgagcactcgtcgatgctcgatgcgctcctcgtcgatgcgagtgcgctctacggccggctaaacgagacgtcgatcgatcggtcgacgtacgaggccttgcgctcgcggacgacagagctcgagcgcgacctttccacggcacaagcccggctcctcccgctccgggtctcacggcagcaccagaaggatcttgtcgagcgagtgtcaacgctcgaggacctcctgattgtggccgagacgagggccgacgacctccaggcaacgctccggtcgctcatcgacgactcgccggctcctcgcctcgccgtccagcgtcctccgctcgacgcgttcctgtccggcgagacgaccgcgagctgctatgtggccaaggcagccctcgatgcgaccctgtgcgcgcacctcgtcgaccgcgccgcccttctcgagcgccgaagccgcgacctgtctacggtcgcattcgacaaccttctcgcgtcgtctgcgctaaccgacgagctcagctctgcggtcagttcgctcgaggctgcccagctcaagcttcagcaggccgagaacgccatcgacctccacggcgccgagcaggcaagctcccgcagtgatatggccgcccttcgttcgcgcgagggcgacgcgcgcgcggcgctcgcctcgctttcagcaacgcacgcgacgtcggaggctgagcgttcggcgctcgagcgcgagcttcggctggcgttgcggcgagtagaggaggcgctcgggaccgagcgcgacacggtcaaacgcctcgcgtcggcgcttggccagagcaaggtcgcgcaggaatcgatgcggagcgactttgataagtaagtaagcacgcctaacgtctgacgttctggctgtgctgagcgctgacctcctgcgttcccttttctgctatcagactccagcgtgcgctcgaggacgcacaggagttcgaggcggcctacacgtcccagctgaaggagaacgccgtccttgccgagctcactgagttcgtccgccgtctctttctcgcctcccccttttccccccacggccagcgcgagattgaccgtgttccccctctgtcatcagcttggccgaagacgaggcccctcgccatgcctgcgttgaaagcccagaggtctgtcagaagggcagtaggccaaccactcacgaccgacgcaccgcatgacgaggaagctgtcgaagccgagcgccgcattgatgacgattcgtataggagacatccctagatgtcactctgtatactcctggtgtcccctctccatgaccgatcggtcatggagaggggacaccaggagtatacagagtgacatctagggatgtctcctatacgaagtatataccccacgcgagaggctctcgcacgggcgtcgggtacaccacacgcggggcgtgtggtgactccctctcttacggctctgccgcataggcgggtgtcgccatgtgtgggtggcttagcgcacccgatggagccggctgggccggctcactcctcgacagggccgaaggccctggccgagcccggagggtgagaggacgctctccccggggagggtgtcgacagcgccggttggctgggctaccgctgcatttatgctgagattccgctgtgaacattgagcgacgtgggatagcgaagatgatgtcctcgcccactcggctctttttttcggacagggctccgtcctgttctgatagcctattggatgtggtttgtgaaacgaaatgggaatcctaacatgtgccctggctacgtaaacgctgaggcggcaaaagcggacgactcccgtcttacctagtgtcgaaatgctacccctagcgccctccggcgaaagcccttgatgagaccccctccgaacgcaacagtgctactaggagggcaccctacaaccctgctagcgcagtaaggacgactgacccgctagccatgcagccgaagcggtgcccctctccgagaccctgttctcaagggcacctgtgatgtggtccattgcggctctcccctcccccgggcggggatcccagctctttgatgagtgcatgtaggtttacgtagccgctagcctatagtaacgcgagtgaacggcacagattaagattttcctgagcaatggacgaggaagtatcctctaccatgtacctcttgtataatgggtgcgctagaacttagtgcgggcaaggccctacctggcgccgctgcgaaagcgaacccagtccgcacaagtacccgaaacggtgtgatcttggcttcttccggtatttagaccaaaggggtgtgcgttgtaatgcactcccgtgaagggagccaaggggtgaaaggcctttcacacaccgtcatagctggctctcaacgaaatctgttaccgcagaggccggggagcttactccaggggagtagggaacgatcggtgtttgggcggggtaaaagctgtaccttcgccgatttgtcgacgaaacccctgtagatctgccccagtcccagtctgccagtgataaggcttgcagacgcgagggaaacagcccccactactgcttaaagcgccatactctgcagaagtccaccgtgcggtcttgggctaaagacattcggtcagtaggattagaagcgttcagctgttaatgaaagcgtaacagctcgccgacggaagcctgaggctgcccaaattataggccctattgcagaggctgaaacagtagcctgcgcatccgcgcagagggtagttgagccccaggtgggggtgaacgggagaggccatctcccgcgacccgcctggctgagaatgcgtacgtgagtagcgtaaagagggcacagatccctctcggcaaatagaaacggtttgtagggctctgttcgtcatccctacagtaaacgatcgctaaagggaaaggctatgcctatagctctccgatgcgcccctccactcccctcggggcaggaaatgggatgttatcgtaccgatccaacaaaggattctaggtggccctccaccaagccgaagagcaaacctttgttaaggaactcggctaactctatccgtacgctcgtctagaaggataggctgccccaccaccccggtgaatggggcagcccgaagcgaacgggaggttgcgtctgtttacccaaaacaccggccggtgcggacccccagggacctgtataccggctgaagcctgtccaatgcccgttgcccagcccttgccttctacgaggtgatggcctacgcaacgggtcaatgaccgccttaactctgagggtgctaaggtagcgaaattccttggcatttgactgatgtcctgcatgaatggcgtgacgatagcctcagtgtctcaacaaagggctcagcgaaatcgcactagtcgtgaagatgcgacttaatctttgtagcacgggaagaccctaggaactttacagctcccgtaccccggcgccgaaccctctacagcccagcaagcaagcagcggcccccgccgtgtcaactgaaaggcttgcctgtagccgttctgcgctcctctcgtacggtgcagttgtttctctgggacggaggcctacaaaaaagtatcgtaggcaaacaatgcttcgcaagcggacggatggaaaccgtcggcgcccagcgctattccactaagtggattcaatcaggttataaccaatgcgaggcttaccgctggagcgatagctctaccggtcgggaaaccgtgtttaagtgaacagccgacgcccctcaaacggctcggctttcaataagaaagttaccctagggataacagggtaatctatgccgagagctcatatcggagcatgggtttgccacctcgataaggtgtcgaggctaaatcgggtgaattgcaaagaagtccaacctggaagatttgcagccaagcagctggcgctacctacgggccagctgaaggttcaacgactagagggtgaggtgtagcaccaataacccctccacgagcgcccgacgccgctctacgcggcgatgacatagtctgaactagcgggcgaccgctagaagcaggggttaaagtcccctgcgataacacgtttggtcgactcagtgtatcctcctggtgcaagtgctagaaagggttgggctgttcgcccagtaaaacactacgtgagttgggttcaatacgtcgtgaggcagtatcgctcctatgcccaaagatccctagccaaatctccacgctactctagtacgaaaggattgagtagtgccttcctctagcgaccgggctgagggacctcctccctcactgcccggtagccacgaagggttcgcccaaggctgatagattctcaagccagcagcaccggagccgcggctatgcagggcagcagaccactgcccgtctagcgagcgctgaaccggcccgagccggaggcgactctgtctagctctgcaccccgtcacaaaccactccaccttatgcgattgctaaagtctgaccccgttttgggtcttgccgagagccacataatcggttctgcccaaccaagcagcctaaactacatatgaaacttcggaagtcttcttgccacctgtctcgtggttcagatcactgccggagcccctctagatctcctcctcgaagctctctcgcccaatggtttccctcaagcgttcgccatttctgtgtccctttctgaagcttcctttggtcctaaagctttagctgggctaaagcaggtggataaagagcagggacagcgaaaggcggacaaacaacgccccacgaacaaagaaaaggagcgagagcgccttcgacatgctgacaccgcggaggaaaagcggaagcaaaaatctctgtgtagcgtcgtcaccaaggggcgaggtggctcacgacctgtaggggaggagatggcgatatttgttcctgtcacggcctctagcacttctgcctcctttcagacagccaaatccccagtcgaaatgacactaacaccggaagccaagcgtcgcgcagccatggaccttcgtaaccaaaaagatcgggagcagcgggcggctgaccccaaacatcgagcaaaagcccaagcaaaacagacggcctaaaagacaatgggagaggcttcagcttctgtctacgctgaggcccgagaaggtatgtcgacccactctgcccctctgacctcgacccccttgccaaagcagattgcattcctttccccccggtttactgggctttttattcaacggttcctcggtgcattccttagtgacggtaacctccagtgtcagaccgaaggtggacttactgcccatttcagcctgaatcagggcgcaggaaatccaggcgggctaggctttgtagtcacggtctacgaactgatggcctcaacccctggcttgttgggcaaatccatgacctttcgagggggtccaattgcctacaccgacaagtcacaccataagacgggagtgtcctactctgcttgaaaagtattcacagcgagcctgccggagttcggtcagctcttccacctattctatgtagacggagtaaagatctttcccacctggcttgttccctatgcagacgccaacttcctagcctatctttggagcggcgacggatgctgtcccactcggggttacggcccaggtcttgccacagatggatttgacaagatgagccgggacaacatcatccaacttcacgccgggtttggcatccagctctaccctatcaaaaacaagcagaacgcagacgggacttaccagtaccggctccgcattcgaaacgcggacaaagaaagtcaagccaacttgcagcgagtggtaggatctctagttcaccccacaatgcgatatcggctaggattgtactaaccaaatgcgattgctaaagtctgaccccgttttgggtcttgctaacagctacatgatcgactctgcccaacctagcagcctaagctacatgtgaaacttcggaagccttcttgccacctgtctcgtggttcagatcgttaccggggtccttcttgccatgcactactgcccgtctatggagatggcgttcaccagcgtagagcacatcatgcgggatgtcaactacggatggctagcgcggtacgttcacgcaaacactgccagcctcttctttgcctttgcctacctgcacgtggcccgaggactctactacgggtcgtactcctcgcccacaagcatggtctggacggttggggtggtaatcctgatcgttatgatcctgactgccttcctggggtactgtctcgttatgggacagatgagcctctgaggtgcaacggtaatcacctcgatgcttagcgctgtgccaggcatcggtgtagacctgactcagctcgtctggggagggtttgccgtcggagaggccacgctgaaccgattcttctctctacacttcctgttccccttcatccttgccgcgctagctgcagttcacatgctgctgcttcacgagcacgggtccgggaacccggtgggagtggacggtaacgcggaccggctacctatggcaccctacttcctgttcaaggacctagtgacctttgttgccttcgccgttgccctcctgttccttgtttgctaccagcctaacacgctagggcactcggacaactacatcgaggcgaacgctctggtaacaccagccagcatcgttccggagtggtacctccttcccttctacgcgatcctacgatctatccccaacaaactgctgggggtgattgctatgcttgcggcccttctagtccttatggttctgcccgtctcagacacaggccgaacgcgttcggcggccttccggccgttgatgcgaatgggcttctggagctttgtctctgtgtttgtcctcctgctctacctaggggcctgccacgtggcagagccctgggtggtgacgggtcaagtcctaaccgtgctgtacttcggttactttgtggtggcccttcccctaatcgggctggcagaaaacaccctgagcgacctggctacccgtggatagggcacccaaccgccgccgagccgaccctagcaaggagctccacgctgcaccggcagcgtgtatccggggttcgagtccccggagccgtggtgaaaggcctttgggcaatcgcttatcgtcgaggagcatttgtttaaagtatgctgctggcattgaggcactagaagagaggaaggcgaaagtctgcatttccagaagggccagggcttctgccctcccttagccggcgcgccgcagcgcgcccaggaaacctctccgcaggtggttggcgcctaggccctcttagacgtgtgctgccagccttggcgcacagtgggacaggatactaaaaaacctgcgttctccggtcagccctaggccgtattgattttcacaaagaggattagctgcgctggcgtcccttcacgggaactggcgtcaagaagccctggctgcgcatgccctatgtttgcaggtcttctggagctaagggacctattccagcgaaaacggaaaccggcggtggacgggtttcaaaagtgggcaggacggacgttgagagtcatgggctctttccggagaaaaaagaaggcaggtgaggaggaactgtcttgatacttacttcgttaggctgagatgccgaaagtatttcttcccgagtaccatcgtattactgtcctaaatactccctgggatgacgtaatttggatgcagaggtagcagagtacgtaaactctggaacgcattgcctcaatacctagcgtcacgattcgctagggatttgggaacctgaacgggcctctgggagaggcgttgatagtaagccacggctgaagcatctttcgcaagtaaagcggatcagtagggcggcacgcagaaacgagccgtcggggattggagtagcggtcggcggggcatgttaaagcaccgaccgcacggggatagctgaagacgggtgctagaccgtacacctctagccgtcgcgcgtcacgctaggccgcgcaggaacagtgctcgttctgaatttatagagagcagtccatagtaggcctcctgtagggcaggattgcccagaggcctaccgaacggaggttcaatctatctaaaagaggacaacgtcctcgctacaaaatgagaggaggagggtacccttatcctcctctgcgacgccgcgcaagcctaacctcttacagccaccctggctagaggctattgcagccctcactccaactctacacaccctgtctctcaaacaggaggggttggacttcggactgtccgcacgagggttttagaccgccttagccggcaggtttatcctttgtgtgcagcagttgcgtttcgtctcttgggccatcctgtgacgcccggcctccttgcacgccttattcagaaggccttggcaagggggtgaaacaccgcaagcagcctcttgcgaatggggcgtgtcttttgataaagaggcgcccaatgactaaggagatagctcctgagaaggcccggggagaaagccatgtttgcccattaacaagcagatgctctacctcgtgctggacacctatcggcctaccgctctccgttgttaagcgtggatgagacaaaaaccctcgtcccgcagtggatcctgtcgccaggccaaccactgcactctgcccagccctccttcctagcgcccactccacgggcgtgaaaagaatcaaggaggaatgcagtgcaaccgatgatgtagactaccggtccctcgtccttgtggtgttgctcccacctgcagatgtaactaggctggttgaacgacgcactcctctaccccggtagagaatgcctcccaaccggatggctagtacccaataagcgcggctccttctgtctgactacttaaggagacaacctgctagtgcctcctcatcagggctcagcagacggaataagttctaccaccccgagccctataacttcaggcgccctcggccgatctcgtggcacagcaaagctagctaaggctaggatgctgcagaatcgcaagggcgctgtaaaaggtatgggagaaggggattggagactgtacgagtgataagcaggcggctcagttaaatgctggagcggggccacaaagcctgtcttgtcatctcttggggttgggagggcgtacgatagaagtcgccttccattcaccagcctcaaggattccgttggcagctgtaacacgttgtattaacatgtccgagttttatcctgttttggcagggaaggcttctcgaaacaaaaaaccgacccccgtcattggtccacgggtcctgccagcggcacggagcgcgcaagcaaagggaaaccacctgcacccagctgcagagtagaaggaaacgcgtagtgggatgctacgtaagctgttgcccgagtcgtgattcgtcattcttcggtgtccatagagagggctcgccatagctactctatgtcaaaataaaactaggtccctgctggaactctccagcgcgggcttctcagccaggtgccacggggacagtcgtctcccggcgtcggtatcattatccgtctaggaccaagcgtgctgcccttcatccgaacccgccctcaccctatatcaaaccttgctcgaaccctggtgccctctaggccctctagaggcccaggtcagagtcgagggttggtggtttcggacaagaacgcatctcggcacgccgtccgaccgagagggaatggagccacagatttgtacctcccgagcccttagtatgccatcctgtataacatcctgtgcaggcgctctactaaggaaccgggcgtgttctgtggatctaacctgcttacaggtgatgtatgtcctccatggccatacgcgagtcgaacaatcgacagtaagcagggacagtgcgcgagtagctctcccgcctccgggtgaaagatcgctttgttgatgaggaaatctcggcaagcgcctttcgctgtacttgaaatgtaacccatttccggcggttctacccgaaccgtgagtacagagcccacccaatcaaaccgccgtccgtgtgttacaacatacggatatctttttccaaggcacactatgcccgaccgcggtaccccatcactctggactgttctatgtatgttaagtctacatgctctctcaggtggtgcgggaaacgttagtagtgtgcctcctcccccctccccctgcatggagcaggtccttgctcacaacctcatcctgctggcccctccaacgctcctggatccgttgttcgagcgtatgaaggctctcctgccgccttccgtagccgtcccgaagggctcgtctgcctctggcctgctcaagggcatcaaccgccggttccggatctaccgctaccgggaaggcagcgtttaccggccgcacgtcgacggcgcttggccgagctcaagcgagtcaccgcccagcgaggatgggaccgtcccggccaagtacatctacgactcggatccttcggtgcgtttgcgctggcctcttgctcctctagtcgggcgctgaccacctgccttctcatggacagctatactcgcgctacacgtatgtgctagcgcttggctgatcgcgtcgtcaatcgctaacatctgcccttctgaccttgcgccttcatcccccagctgtctcttttacttaaatgactcgtttgtctgcgtcttccggcagtgttgcccgctccctcctgttgaccccttctgctccctgcgattcagcttcgcgcacggcgagacgacgttcttcgtcccttgcgccgagcgggacggcgttcttgatgctcggcccgttcggcctttgcaaggctcggcactcatcttccccgtaagctgctcggactgtcccctagccactaaagcctgcagactgatgaagtggctcacgcgcttcgcatttcttttcagcatggcgcgaccgagggctcgcttctgcacgagggctcggctgtcttcccgaatgccgtcgagggcgccaagtatgtgatccgaaccgaggtcctgtacgaggttgagcgccttgcgagcgccggcgagggcggcgttgttggtgggctggtttgaggcctgtttcttctcatggtccttcggcatctgctatctttgtgctccggccttatcgcatggtttggccccatccaaaggcgggcgaagggagtcatcgtcgcacgatcgggtccttctcgcccgcgtctgcgtcttcctcccaaggattcgctgcccccccagccctggagccctcggccttgccgtggtcgtcctcgtcctcgtccgagtcgccaagctcccacttgccaccgtcgccctcaaactcgtctctcctgcccgctgcaagcgagcgttcttcgtccgcgtcaaacagcgcgcggccctcttcggccgctgccgaggccgacgcgcccgagttgccccgcgcgcgcgtcccacgccgacctgggagagcggtggcatgcgatggcgtcggcgaggcaggcgaccgtcggttggactgctcggcctcgattccgccgggcgtatccttttcggacgaaaggaagacctgggcgagaatgagatgagggtcagctgctaatgagcgcgacgagagacgagcggcagacatacgacgccaccgagaagaatgccgacggcaaggccgagcaagcaaagcacgacccaggagtaggcgccaatctgcgaaggtgtcgcgtcagcatgcccgcccgcagcgatcggacggagagcggaagagagccgacctgatcaaggaagaccatcgagttggcgaatcctggagagaggaagatggagagtgagagctttccggtaagcggttggccacgctgggaatgcaagacattgcggccacccaccgagcaaagtgtagccggcatagaacaccgggactaccaccgtcgaggagtatgctctgcgaggaggaacgccagtcagtttagagggcaatacgatcggtgagtcgatcctgcgacgcacttcaagccccggttgagcgcgatcatctgcaggacggcggtaatggccagcaggatgattgtgaggatcggtgttggacgccaatactgtaaaagcagagtcagttttgctgcgagccaactcggggccagaagaggaaggtcgagcacgcacaacattcccctcgcccatgccgatcatgacgaccgccttcgcgagcaccagactcgcaccgctcagcatgccgccaaccgcggcccagccgatgccgacgtagaacttgagccgcgcgtccgggacgcgctcgacgagaccggcaacgcggaaggcgatcgtccgctcgagagttgtgtagtgccggtggaccgcgagcgtgaagccgaatttgggatagcgcttatgcggcggtttctggagcaggcagtagagtcgttgtcagccggcgttgcggtcactacaggccagccagccaacgactcacagccagatagccctcaataaccgtttcatcactcgtccgctcttctacgagcaggccgagatggaggacaagtagccagcttccgaacagggcgagcgcctggatgacgaggtaggccaagaatgccggccgggcccaaagccggtacaggcggtcgagctagccgcgcggaaagtcagaggtcagtccgtctatatggctgagagatcaagagggtagacaccgaccgtgattgacgtggataggcccgagttgatggagccgaggataacgatgaggacgacaccgaggatgatgagcgcggtcccttgaaggtccttcttggttatctctgtaacagcgcagggcacatgtagtccaatcaacctccctttccttagctgaagccctagttgacggccgcaggcaagagagggacgcacgcgttcctagcagatagcgagcgaaaagaaagttgaagacgagcgagctgctcccgagcggggcgacatactctgccctcaagtagcgcagagcgagcgtcgagccaaaaatctgcgaggcgaggtaggatgcgaggcctgcgagccagagcggccgcatgtactctggcggctgaggcgagaggttgacggtacggaggtgctgcgggtccgaggggtggtttcggacgagggaggacaggttagacggcggtcatcgcctcacggcatgctctaagcaagttccagacgtcagacatacgtcgtacctgccaggtgagagggagatggagttcaagcgaggtcgtcagccagagcgacgcaacctcttgtggacccgtagctcagcgtgagtcccgctcgactacgcactgcatcacattcaggccaagcgagttggcgatcgagcttgcggtgatgacgagcaggccgaggatgaagttgacctgcagtgcaaacgctcaacagacagcagcgaggtcagctccgtgtcaagggaggggcggcatgagagtagctcccgcgagcgacccgagggatgggaagggggacgcacgaccggattgccaggcagcagctcgagctcctcgccaggcttacctggcccgacactcgcactcgcgttcgcggcgagcgagctaagagcggccgtcgctgttgccgtcaggacgtccgagagcgaagaggccgagctgctggcgaggggggtcgtcggcgtcggctcgagggcgggcgttgaggagggtgtggcttcggccatcttttaagagagcaccctggcaagcgcgagggacaagcaagatcgacggcggaggagctctaaattcgtcggctttgaggatgctgtcgatgggatggagagcaagtgacggtcggaagggtgtcgtcgaggtcgaggtcggccgccggcgacgtggccgcgagccgggctgatgccaacgtcaaacgcccagctcgaaggcctgccagaagactccagcgtctggcatcgctcgacagagccttctcagacggtcacatatagaagagcagcggtcaataggcatcaaagacgatgttgaggggtcagaagcggggagcaagacctgaagcgagaagcggcgcgcagcaaggaaaggacgggaagccagggggcgaaggtacgaggggagtcggaagatctacaacgagagaggcaggggggcaacggacgtgtgggaatgcttacaagggaaggaggcgtgggtgtgcagatgcgatgtggtgaaaatgcagggagaagaaatgatgatgatgcttgcgactaaccgccggcatggatgagatgaactgcgaggccggcgccgatgccgacgagcccgagcgcggcgcctgccgtcaggtaggcgacgacaagctggcgcttccgccgggtcttgcgcgcgtggaaggaagtggagcgagtcgagatggccgaaggtgagggcaagggcaaggacgggggcggcgagaagggtgcgttggaggtgacaccgtgccgttgaccagaggtcgacccgctcggctcgctgctacccaaaaagcgactcgcctggtttgtcggtaggagcggtttgagttcgcctttggccgtcgacgaggacgacgacgacaacctgcgcaagagcgcggacgaccgccggctgacgaccgccatcaacggcccaaggatcgaggtcgaggtctgccgctcggtctctggcgatccgggcacgagcggcaaagacaaagacgccgtcggaagggacgtcgtccgtgagaggcttgaaggagaggggaagccgtacgtgccgctcaagcggagcgcctgcctggccggcgctgacgatgggtcggatgacctggcggcggcggcggcagctagggaggcttgctgatggcggccgagcgatcccgggagcaccgtcaaggggagcgtcgagtgagccggccggggcgtctccccatcatcgaggtcgactgccgttgacaagcccctcggggccgaatgaggatcaggaggctcctccttgccaccaccgtgaccgtcctcgtcgtcctcactctggctgactccaccgtcgctctcgctccaccagtcatcgcttcccctccttccgccctgcaggccgtcctcgtcttcctcgtcgtacgcataaggcgacgagtggtcgagcgggtgccgaccgccgcggccgaactgcgcctgtcgattgagctcgtcgtcggtaaacgcgaggaaggacgggttggagccgacgacctgctcgccaggcggcagctgaggctggcgatctggaggtagtgcatcgaaaggacgaggtgtgagatggtgctgcagacaagggggaggcggacgatagccgcgctcgagcacgccgatagcgattctcgcccgggcgcgcgcgttcgagcaggacggacaggagaattcaatatcgagcgaggtcgcgagcggcgggttctttggctggttgggctgccctcggccctgggggatcgggcgcgaggccatcttggtgcggaagctggaggtgtgtgatggtcggtgggagggcaagagagattggagaggccggcgcttccgcccacgcaggagacaaacagccggccttcctcgtgttacctcgacctcaaagtagggatgatgagctagagaccaggagctctcttgtgcgcctctcttcagtgcctgtcagccagcatgccgggtccaggagtcagggcgaccaccggctcatcgtcttgctgctcggctgcgcccgctcgaaacgcctcgtcgtcgcatccggcctcggccctacacgaaccgcttaacgacgacgtcgccgccgacagcatctcgacctcctcctcaaaagaagatggccagcgtcctcccaatcaggggcaagccgctcctctacgtgacctcgacctttgcttcgcttggtgcgcccgctcgacgctcgcgcccgccgaaaggccgcctccgaccagctgaccctctgctcccttccctcccttcccttcttccctctcccttcccttcttccctctcccttcccttcttccccctctttccgtcatctctctcaggagtcttctgcttcgggtttgaccagtaccgccctcattgtagcttgtctttcagctctgacagcttagactgacccagaacctgctctccgaccggcgtcttcgtcctcgcgcagaggggtcatgtccggtgtcatcactgggccgtacttcaagacggcctttggcgaccccgagacgggagctcccccaacagcagcccagatagggacggtcgtctcggtccttgaggtcggcgcgtttgtgacgtcgctgcttgccggccggctcgccgacctcaaaggcagacggtgggtcatcgccgtcggctcgctcgtctttacgctcggagggctcctgcaggcgtcggcgaccaacctctggatgctcggcctcggtcgcatcatcagcgggctcggcgtcggctttctgtcgatgatcgttcccatctttgcgagcgaggtgcgtcccgagcgtgtgaaacgagcacggctgcgccctcgccctcatgggttgaccgatctgtctgcccaccttcaggtcagcggcaaggaagaacgaggccttctcggctgcgtccagttcacgctcaacgtctcgggctacgccgcctccgtctggatcgactatgcgagctccttcctccgatccaacatgtcgttccggctcccgctcctcctccaatccgtcatcggcctcctcctctttgtcggctccttcctcctccccgaatcgccccgacacctcttcgcctcgggccagccggaagccggccgggccgtcctctgccagctccgcggcctgcgcgacggtgacgagaggctcgagctcgagattgcagagattgaagaggtggtcgcaatcgaggagaaggagccggaccggagctaccaggcgctctggcggagatacaagggcagagtcctcattgccatgtcgtcccaggcgggcgcccagctctcgggcatcaacgttatcaggcgcgtctgattgttccggccctcgcggtggctctcgccgagctgacgtctcctcccgtcctcttcgatcagctactacgcgccgctcgtgtttgaacgtgcggagcgccatccgtctctatcagtgtcgtccagctccctaacccctagtcccctgctctcctcgaccgcaaacagaggccggctggatcggccgcgacgctatttttatgacaggcgtcaacgccctagtctacattctcgcgactacgctgccgtgagttcttattccttctgctttcccgcctgccaaagcgatgagcgcttacccttaatcgcgctctttcagctggtacctcatcgaccgcgccggccggcgacccatccttatggctggtgcagtcgtcgtgagcgcccttctgacgcgcctccacgcatccgccgctgatcatttggtcctcaacagatggccctgacgctcggcgcaaccggctacttcatgtacctcgacctgcccttcacccgtgcgtccgcctccagtttgacggtcttggttgaccaagctgacactcgacctctgcgcacgcctcgctccgctcatagccaacgccgtcgtcacttgcgtcatcctcttcaacgccgcgttcggctgctcgtggggaccgatcccttggctcttcccgcccgagagtcagttgagaagtgcccagaggtagttcaaacgtctaaacgctgactctaccgcttctacgtcgggttcgttcacagtcatgccacttgcgttccgcgcgaagggcgtctcgctctcgaccgcgactaactggtgcgatgcacccaacttctgttcaagctcgcgcgtgctgacttctagctctacgtcacttccgcagggccttcaacttcctgattggcgagatgacaccgatccttcaggagctgatcgtacgtccagtctcactcatgagcagttgcgttgactcgtttccctgaccgttcctgcgagtctcctttcaaagacctggcgactctacccgatgcacgccttcttctgctgcgtttgcttctgcgtcgtctacttcctctaccccggtgcgtctctttctttcctcttaggctggacatctcgctgacgcttgtcgactcttgcctcgcagagacggccggtctctcactcgaggaggtctcgctcctctttggcgacgaggacgacgaggacgagtcggactcggatgccgacgatgacgacgagcaggacgatgacgacgagatgcgtcagtcctcgttgcgttcagactgccccgaacacgctgaccgacgtctcctccttctcgacctacttccagtgtccggcacagcaactcccacaggcacgcacaccccaaccggcgctggcgctggcgccgggtcgagcctccctgctggtggcctcggttggtttgcccgcaaaaaggccgagaacgcgaagaagagcgtcaagtattcggcgctcgagggcggggacgggccctgatttctttccggcgggctgggccgagcgctgccttacacgtcgtcggagacactgtatcgattggatccttgccgtcgcccttcgatgccctacggcctctgaaacgcccttcggctgccccttttccttgctactttcgcagcccttcgctcgactgcacttgacagacacacagataagcgctgctcacttttacaagctgttcagcgctcgcagccgagcaggagaagggtctcttgagcaaggaggccgagttggatgtgggtgacctctgtcgccgtcacccgacctgctggatcggctccgctgcgtcgggcggcgcgcaggcggggagtctcaacaccgacgtagggaggaggaagggcctctcgaccaccaccaccctccgatccggacgatccgcatctctcaagaccgctgcatcgtccagaaacggcaccgcaggcgccgtcgtctcgcgagtaactgctgccacaggtgcgtgagctgtcgatcggagagccccggcagttccggagctcgatgggcgcggccagcacagggagaggcttcgatgccctctaggcggccgacgaaagctgctcctctccctcaagctcctagtatgccagagaggggcacagaagggatcctagcgtcgtgactgcttaccacctccccttcctccccttcctccccttccccccctgccggtctccagtctctgacgatccctttacttccagttcttcttgaccctggccggggcccctcatcttaatggcaaagtgcgtctgtcgctctagcctactcgcggaccatcggctggatctgaccccctcgctcgacctctgcagcacgtcgtctttggccgcgtcgtctctggcttcgaacacctgcgcacgatcgaggctctcccgaccgacgccaaagaccggccgctccagcccgcccggatcgcgcgctcaggcgagctccagctcgccaagaagcccgccgccgccgtccaggagcgcgggcgaagcgcttcgcgcagctcggccggtcggtcggcgagccctgtcgctcgtcggagaggccgtgaggccgacgttgacagccggtcacgctcgagatcgaggtcgccttcacaagagcggtcatcgcgtcgctcgaagaaggcccgacggtcgccgtcgacctctgcgtcgtcgtcgtcgtctcgctcccgttcgccaccgcgccggaagcacaagtcgtcgaagtccaagtcaaagtccaagaggtgggccgacttgccgcccgccgaggagcggcgagacgctcgtggaattccactcgatcgggacgagacggacgccgagattgacgcccggctcgagcgggaggacttggagcggcgcgagcaggagaagcgcgcgcgcgaggaggcgcttaagcggcggctgagggacgacgaggctcgcgagcgagagcgggcgaccaccggtggtgtccagtataagggtgcgtccctgcgcttcgctatcctctgttggtagcagatacgcagctgctgactcccccccccccctcaccctttccgatacgttcctcgcaggccgtggaacgatgcgctacaccgaggaccggccgacgcccgacctgccctcttacgcacgttcgtaccagtcgaaccggcgcggccctcccccgcacgccgacggcggcgccaacgctggtacgcgcgagcgcgaggccctgggcgaccgctggactcacgaccgcgcggccgacggcgtcggcgcgaggcagacggtcgaagatcggttcgtcaaggctcgacgggccgaggctgaccggacggagctctcggagggtggtcgggcgctcgccggacggatcggacggtcggctgacaacccggatggaggaacgtccggtgacctccgctacgacgacgacgacgatgatgaccggccgcgtcgctcgccgagccctccacgccggacaggcgaggacctgtcgatccgcggttccgccgcgtcggcaactgcccctcctccgatggccatcggcggcgtcgacgagatccacgtctcgtcggcccggaaagacgaggtccgccagctcgagctcggcgacatccctgccccggcgggcggcgggatgcgctcttgggactgaaggctgtcgatcgatgaccaggccatgaaggtctttcctgctgtcttggaaccgagtctaggacactagaatgggtcatgcaaggaggaagggagtgtggcgggagagatcgtgtgtcgtgcgcgaggggtctgagggaaggagatggaccatgagggcgtcttgagtgaggcaaacagggcgagtggcgaggcgacaaagaagggggcaaaggcggcgtgtgcgtgagaaggggggggggggatgaattgaggaaagtaatgcgatgggaaggctggaccggccaacctcagagggtcggatcaaccgtcgaagctcaggcgacggcctcgttcgcgactgcaatggccgcctcggcgtcgaccgcggccgagggcgccttggggatctcctcgaacgggccggcgagggcggtgagctgcttgcgcgtatagctgtcgagcatccggtggccgacagagtagtatcgcgggctgctgtaggcgaagaaggcgccgacgtggcgtgtcatcgtaccctcgaagtccttctcgagctgagagagggagaaaacgcatacttggtcagtgtttgttacggcggcgacgagcgcagggagaaagaagggcgacacacctcggtccggaggtcgcgccagacgcgcggccggtcggtcaagatccacgtgcagccgagccgggcggcaacgcacatctcgctctcgtggttgacggtccagacgccgaggttcttgccctcgcggaggcacatctggcggaaggcctcgccctcgggcgtcaggagcagcggaaaggcgaccgagaagcccgagacgtggctggcaaagtagtgggtcgccagcgagagcgacttggtgatgtgcgtgacatgcaggagcgggaggtggcgccgggcggggaggatgaaggacgtatgccagagaccgagaatcaggcgcggggcgaggtctgtctcccagttgggcaccttgctgtagagtcccaggtgaaaaggtcaatatcaacagcgaagcagaatgcctcctgaacgcggaggagacgaaccggatgatttcggcgatcagcgagaagagccggtcggcgttgttcgacaccttgacgtcgatctgcggatgccgacaaacccgatgtcagcgcaggcaagacgggagcgtaggcttcgggtctagactcacattgaacttgacgtgccgcgccccgggctccatcagcaggtcgatcatctcctcaaagagggggatcggctgatgcggcgccttgttggtgagcgccgtcctagcgaaggagaagcccatattagcattcttctcggtcgcgcgtcaacttttcggacgcactcgatgacgctcgtccaaggttgcgtcttgactggtccggtcaggttcgtcgtgcctgtaggtgagaggctccgtcaatcagcctcggcgcgcagacgaatgactcgtgcggaggcgtacggtcaagcgtcgcgtcgtgaaagaggaggacgcggccgtcgagcgtagctgtgttagacgtgggcaggtaacgtcagccccgagaaggccgctatcttctgaggtcaatccgacgcactatgcacatctgtgagaggcgacgtctgcgtcagcgtcgctcgtcgcggcggcgcacagcagcccaaaatatcgactgaccgctctcgatacactcggacccttcgaggacggcggctcggaagctcgcaagcgagttctcggggaactctgccgaggcctggcgcaggacttggatgtcagctgaggatgttccggtgggagcggggtcgtgggctaacggcgcctgcggccggggctcgtcggctgaaccgagacggcgccccagagcgacggagctcgatagtagacagaggacgtacgcctcggtggccccagatctcggcgagcggtcctggtgggcgctggccgtcgagcttctcgttggccggcgacagggagcggatcgacgacattgtgcgacgggcttccggagggaggacgagggctggtcggagaggcagctgcggctggggaaggtgacggcggcggagtggaggtcggagcgagcgacagctggcgacagcggatggcaggcggcgagagcgagcgagcgtttccgcaagagaaagaatcgtaagagggcggtgattgggggtctgtaggaagaagagagagagaaagggtggccgtcgtctgccgcttccactgacgaagagggtgcttcagcacgttgctttggcgacgcggagcggcgggtgccggccgaactgctgcgccgagcgagcactgcaggcgtcgtcggccttacgtcgtcggcgaggtcgaggtgataggcattggataggtaaagggcagcgcagctggcgacgagcggtacagagcaggggaagaaatacaagcggaggttcgtagaaccgccgcgagagagagacgaaagcgaaggcgagggcgaaacaagggtcaagaccgggtggtccagacctgatgagaacgtgtgggacgagaggatgggagcagatgcaggatgatgagagaggagattacgcgtaaaggttaaggtcgaggaggccaagtgtccagagattggcgaggggcgaagaaaccgatgcaaagatgggggggggcgctcagtgccactggccgacgaggccgctggacgagacgacacgatcccgaggattgccggcccgagtcgaacggcgagggatctgcgaattcggtcgaacctcgagcgagaagtgtccgacggtgcgttcctcaaagagaccgctgtcggggctcggtccggtctcggtctgggagaagggaagggcaggtgaagactcgtcagctatgtcctcggtgagcagggacgacccaggcgactcacgatcttgagctcgagccggccttcatcgccctcggcgggaacaccctcaaacatgccacggtcgaaagacagccagcgcgggagcgctttctcacccttgccctcgggtccggtcgcgaccgcgcggaggacgccgcctcggtgagcggccgcggcgtcgtcgaccggccggaacgagaagccgtcgccgatgtacgcgtagtagatgattgcgtcctcgctcgaccggaacgacagcttgggcgagccagccgagctggggccggaaagcgaggcggccggctcaagcggccggggcggcgtcaagcctgcggtcgagctcgatacccgccggttgatcgtcacggcgcgtgccggccgtgtgggcaggcgcgagttggccgatggtgtccgggcgagcgaggccaggggcgagacgagcgacgtcccggcgtcggcaccatggtgggtgtaggctgcaaacgagtcgtctgggccgccgctgtgcccgccagagtcggacgagtcgtccgtgagcgtaaagtcggcgacgtcgccggccggcgtccggcgcgtgtgcaaaagctggccgtgcgagccgacgcggcggttggcagcgagcgagtcatctgacgtctgggccgggtactccatgaaggccgtcgggccgttgggacccgagccggcttgagcggcagactggggcgagaagggcagcggcgcggggtgttcaaattgctcgacagtccgggccggcgggaccgagtgccggacggtccgggcatcaggtacgacgtcgtcgtcaaccgctggtggcgtcggggtcgagccggtcgaggtgacgcagaccttggtcgcctgagtcgtcggcacgcggctcgcatgcgagatgatggccggctgcgagtgatcctcctcggtgctcacagtggagagcatgacgggcccgaggtctggcaaggagccggagccgtcagcgcgggtgagcgcaaaaggcaggccgccggcaggcgtctcctcctcgtcccggagcgcgcctcggccggccgagtagtgcgacgggagcgagcccgacgacggctgtttgtcggacgaggcggccgtgtcgaatgcggccggaccgggcgggttgttccagtcgtaggtcgaggcgctctcccacgaggcgaggctctggtgcgtctggtggccggatcggctaccgttggcggcaccacctggtcccgagttgacgacgccgtccggcggccccgagcggatgaccgggtcgtgtcgaaggaaggggaagagtggccgttgcccccatccacctccgctgccagcagcagtcgccgcaacgccaagggcagcgccggcggccatggcctggtgctgctggccgcggccgggcgtcgacggtgcgcggtccatgctcgaaacggagctccgccggccgtcctgctcgtagccaggggtcgagcccggtgtctggccgggccgagtgtgctcggcgtagaggacgggcgtcaacggcggctcagtcgacagctgctcctcccgagccgaccagtagccattttcgtccgacgtccggggcgtaaaggcggtcgctgcagggataggccgcgacacgcccgacgcccggccggacgagaggctggccttgtgcgtcgagaccatctggctccggtcgcgaggctcggcgttgctgctgccgccgacgaaaaagtcgcggaagcgcgagagcgtcgtcgtcgacgagcgcttgacctcgggcgcaccgagcgccccgggcgggagcgggagcgagatgatcggccgctcgtcgccttcgccgccgccggcgtcagaacggaggtcgacatcctcgtcttcgtcgtccgggtcgaaccagccgccgtcgggtccggtggaggccttttcggtccgagctcgcttctcggccgcttcgtcctgtgtccgtcggcgccggcgccggcagcagcaaaagaggaggagggcgaggatgatcgcgccgaggaccgagccaaggacggcgccgagaatcgtcttgcccttgctgctcaggccgcccccaccgcctccgccgttgttgtcgttgctggaggcagccggggccgtgctgaggttgacggtcgtccgctcgtgcgagcgcgcgctcgtcaatgcgtcttcggccgtcagggtgatttcgacctggtcgtatgcgaggtcggaagggacgacggcctgcccctcgccatcgacggcgcgcttgctcaggccgctgttggccgcatagacaaagtcggtcgaattgctcgcctgggcgagtccgcgatcaaagacgccgacgacgccgctcgtccggttgaagcggagccactggccagcctcctcgggcgtgtagacgaccgtcatctggacggtcgacccggcctgaacggcgtcggccaggttgcggacgagatcgagcgtgaagggctcgccgacggtcgcgttgacccggggcgggtccgtcgaaggcgagttgaagagcgagggataaatcgccaggggcaggcgaagcgagagcgggctgctgagggcgatggaagagccgttgctggcgctgctcgacgccgccggggctgtcgagcccggaaagatggtcaccggcagggagagggccgaggacgaggtgcctgacgcaggtttgctcgccgacgggtacgtcgagttggtgatggcgctctcgccgacggtgccgtagaacgtccgcgagctgagatggacgagacgagggtcagtaacgaggtctccagacgagattacagacagcgcgacgcaagagacgcacgttgcattccactcgagtccgctgacggccgagcagtcgacggcgacggtcgcgctcgcgagcgtcgcgttcgtcaggagggccgagccgtcggcctgctcaatgtaccacggcacgtcgaggcccgactcggccgtaatgttgagcgtccggaggctgacgacagccgaggcagaggccgagggcgcggcgctgctgctgctggtagccgatgcgctggcactcgcactcctgctgatgctgatgctgctgatgctgctcgcgttggcctccgacccggcgcggacctcaccctcgaccggctggcgcgagacgtcgacctcaaacgtctggcagacgtccttgccgccgtcccagcggccgccgcaaaggtcgaccgaccacgtaccgtcgatcgcgggcgcgacgccgtaaaagaagataccgtaggcgtcaaactttagccacgcggggagggccgcgcccgagctgagcgaggccgaataggcgacgaaggacgacgtcggcgagacaaacgtcccgcgcgagaaggcgatcgaaaaggaccactggacaagagtgaggagggagagctcagtcagcgctgaccttgtcagcttctgcgactcgcgaggggagcgacgcaccgtgttgggtatccgggcggagccctggctggcgccggcgccgtcgtcggccgggaggagaaagacggagctgatggcctggttggccggcgtgaactggctggcgaggccggtgccctcgaccaccttggcggccgagggcgctctccgggcaaaggccgacgacgcccgacgatgctggaggtggcggccgccatggtgcgagctcgacgagtggccggccgagacgagcgtgacgggcgagagcaggcctacgagcaggagcgagaaaagggcgccagggagcatcgctgcgagcagcgagggcgagggcgagagggccccggtgtcctgaaggcgtgcgggcaggcggaggagaagtgcttgatggggcaggcgaggcgagactggtgaggcctttgacgaggagggtgagctgagcgacccgaagaggaggatgaggagggagtgacaaggaagggagtgtcggtgaccgaaggattcgtccgttcgccgctggctggcagggtgcagagcgaaggaggagtgtgtgtagggtgtagtggagttcgactggccagcaggaatgatagaagggtagggttggggtgctctggctgtggctgctcgctggctgctggtgacggcgggggtgggcaggggcgagaggcgcgcgcgaaaacggcaagacgcgcctcgacgcgtcgcaaaatccgacgacgcgccgcttggccggcgcgggcagccaccgacgcgtccctgctctcaaccacctcctcctcctcctagtcccctccagcatggccttcagtcgtcgaccaagcccgctcgagctcggctcgtcctcgacaccggcctcctcgtcctcgtcctcgacgccgccctcgtcgcccggcttcaagttctggaagaagcagaaggcggccgtcccggcgccgccgaagagcccgacgtttgccctttcaaacagccctctgcaccctaacgcccagcagcagcagcagcagcgggcggctgcaggagagagggcctcctcaagctctgcggctggcccgcagagtattctcatccggcatgacgcccctcggcccgcgccgctcgcctcgcatcccttgcccgcgcccttcaagtcggccctccctccgagcctctcgcgcgaccggcatctcttcccattgctcctcgccgaggcgcgcttgctcgcgcagcagggcgaagagggaaagacggttgtttatacggcctggggggtcgagtggcggcctttcgggaagccgaggagggtgagggagatgagcagtgtcgtcttggataggggcgttgggggcgagattgaaggggatttgaagcggttcatgggaagagggaagtggtatgccgagcggggtgagtgtcgctcgttatggcttgctctacgtgtgggcgttcaacgctgacccccccccccttctcgatcgcccgcaggcatcccctaccgacgcggctacctcctgcacggcccgccgggctctggcaagtcgtcctacatccaagccctcgccggctccctctcgtacaacatctgtctgctcaacctttcggagcgtggcctaaccgacgacaagctctcgcacctcctctcgcttgtccccgaacgctcgatcgtcctgctcgaagacgtcgatgcagcgtttacaaagcggcggagtcagacgagcgaagatggctaccagtcggccgtgacgttttcgggcctgctcaacacgctcgacggcgtcgccagtgccgattcgcgcatcgtctttatgacgacgaaccatctcgagcggctcgacccggcgctcgtccggccaggaagggtcgacctcgtctcgttcctcggcgacgcgagcccttaccaggcccaggagctctttgaacgcttctacggaggatcgaccgacgagtcggacccggtcgtgctttcccaacgcgccgaggcggtcggccaagcggtacgagagcaggccgagaagcacggtaaagcgatcagcatggcggcgctccagggcttgtttatccgctcggctgcggacgaggtcgagcgggagctgccgggcctgtttgcagagcgcggcgtcgagctcgatccgagggcaaaggcagcggcggcggcgacaaagaacgtcaagggcgattagatgcttgcccctttctttgttcttttgctcgcgaagacggtcggggggcgcgagggtgaagaagacgcatcggcatcgcacgcctcgcggcttaaaaactcatccagcccccgccatcgctgaaggagaaaggagaggggcgcagatgtcagccgaacggacgagctactcggagcgcaaatggcacccaggaaacggacagcaaagcctccatcttgcgtgcgacaaagctcgggacgccgtgcgtcagccacgtctttcggatgtcgtcgagccggggcgagtggaggtactgcgggaagccgcgcttcatcgactggtcgagctcctgcaaagtcacgagggcgcgaggaccagtcaggcaaagaggagagacgcgcgcgagaaggaaggcaaagaggggtgcgcacgccgtgggtgtcgaggtagaagtttgagccccacgagccggtgccggcccagagccagagtacctgccacttgcggaggtcgaggaagatgccgatcggggcattgcacctgcaagaacgagaggggggtcagggaaccggaggtttcgaagaggggcggtcgggcagcgagtgggacggaccggcgcatgtggaggttgcactcgccgaggccttccgccccgccccagacgtcctcgcggcagcagctgacgccgacgcagacgccttcgccgcaaaagaggcagacggccatcgccgagggtatcgtccgacacgaggcgcactcgcgccggccgtacgtcgcaaaaacaccctcgaggctcggcggcagccgcgcgagctggtagacgcccgggtactcgagctcgacagccgagtgctgcgagcgggggccgtagctcgcggagaactgcttgaggtaggacgagacggtgtccgagatggcagacgcaaagggctcgacctcgttgccggccagaggcgagagcgtcgtggcgggactcggaatgtgaagcgaggccagcagccggcggtactcgccctgagggctgccgccaggggcagcggcggcggcggcggcatcgaccgcagtggcaccgagctggagtagactcgagctcggagccgaattgagcttgacgactcggtggaggatggccgcccggcggaggaagggcagcgtgaacgcgtagaggagccgggcgaggacgtcgtctggcaagcagagcaagtactctgcaaactcaaactgaaggatgcgcgagtgggcacacatgctgccgacgagatgcttgacgtcgccaaagatgagccgggcctcggtcgcgtcgacgtcggtcgttcggagccaggctgccggccggccggggaagctccggacgaggtgcagcaggccgaggacggcccggcagagctcggcgtagaacgtcaggatcaggaccggctggaggtactcgtacgcgatggccgcgccctcaacgaggagcccgagcgggtcacgcaggagcagggcactgctcgtcttgtggtcgcggtaccagtcgggcaggagccgcgcaaagaggccgtagcgggcgctcgtcagaccctgggcgccgccgaggttgaacgcggtcgcgtggcgaagcgagccgagcaggcacttgagcagttggctcgtcgacccgttgagcgagtcggcgaccgactcgcccggcgaggcctggccgcgctgcgtcacctcgagcccggcgagcgtgtaggcgacgagctcgtccgggaggtacatgccctgcgccggccggtcctgaacgaccgtctcaggtaagctctttggccggaggtggaccgactgctgcgaaatgggccgtacgacagcaaacagttcgccgagcatctttttcgtcgactcaaagagcggcgtctgctcgctctcgggaaagttgaccgtctgggctgcatcggcgtaaagcggcgggagctcgcccgtgtcggtccggtgggtaaacatgagcgaggtgtcggggacgtcgcggagggcctcaaaattgatgaagcgaagccagtcgcggagcgggagctcgtcgctcttaaccggcttggccggccggtcgtaagggttctgcatcgggagcaggacgttgccgaggctcttgcagagcgggcagttgaactctttccgggcgacattctccgggtggttccgggccgcctgggcgtggtgcctgttttcagtcgtctttgtgtagccctcgaagcactcgaggtgcatcaggtggccgcacgtcgaggtgtgcatgccgaaacggaaggtgttgcgcgggtacgaggcggggctcgatgccgccttgagcgaggctgggtcaattgtctggtcgagcgaaggcgggaggaggagcgcctcgtcgacggcaaacggctggcccggcggcgcccaccgaaccagcttggacggctggatcattgcgaggcagccgcaggcgagactcgacgtgcactcctcctggcagaccatgcacgcgccatagacaatgtcggcctcggctccgccgacgtccatgtcgtcgtcgctgtcgtcctcgtcgccgtgggcttcgaggaaggcctgctggtccttggtgaagcggctcatgatggccgcctggcgcgaggcggccttgctcttgcgcgcggccccggctgactcggttttggccggcaccggcggcggtacgacccgccagcggacgacctcggcctcgcaaaaggccttgcaggcgtcaaggcaccaggcgacccggggcttgatcgtccggaagagctcctcgtcctcgatagagcagagaagccgaacgagtgtccattccggtacaaaggcctcgtggccagcgacgcgggcaaacgtctcgggctcctgctgaagacagagcatcgcgaggtggagggcgagctcgaggaccgactcttgcgactcgcgcgtcttaccgtcggtcgagccctccttgttggcaagccggtggagcgggacgaggttccagagcgtcgagtggacgatgtgcggcaggagctcggaccggtagacgagcggcaagccggcgtaggggcccggcggaacctccatcggcttcggcacgtgaaggtagtccttcttagcgccgtgggccttgcgccagcgccgctcgagcaggtcctcgacctcttgcttctggttgcgcgagtagtggtggaagagggcgtcgacctcggcaaagcactcgggccggagctcgtaaaggccgaggtcgttgttggtctcgggctggcggaacgtggcgacctgctcgatcgtcgtcgccaagtggatgctctcgttgacgcgctccggcagcttcttgatgaggtccgagtaggttgtcgctccgaggacaagcgcatggacgatctcgcgccggacgaaacgctcctcggaccaggcgcagaggttggccggctcggtgaggcaggtgatgagcaggaggaggaactcttcggccatgccggccgccgggtgagcgtagaccgggtggtccatgttgcccgagaaccagtcgagcagggcaaagcggtcgaggaaggtcgcgagaaccgtatcggggtcaagcgtgcagagcgcgacttgaaggagaaagatgtcgttgtcccaggcgacctcacgaatgccgagcgccgtgtgctcgcggtaatgatggtgctgctgacgcatgctctggccgttgcgaacccagaggccgttccggagctgggcgacgtagacggcgactggcgcaggaaggacaagagggggggggggggttcagctggccaggcatgagattggtcacgagacaatcgcgcgcacgcacccttgagagggacgtccatcaggatcaggatcatgtcgttcgtctggcggatgcgctcctcgtcctcgagcgcggctgcgccgtcaagcatggcgcccatgacctcgcgcagctcctgggcgcgcatgccgtccatcatggtcacgagcttgaggcagccggccaggagccagtgcatcgggtggtggaagctcatgaaggccgcctggacgtcgagcgcgagcacccgccagcgatcgcggccaaaggcaaccgtgtgccaagctggggcgtggaacttggaggcgtcgaggccgggtgcggcgagcgtcgccatccggaagatctcgcgcgagatcgaggcaatcgtgaaccagaggtccttgcgcgtgccgctcgagtaagagaggctccagagccgggcgacccggccgaggtcgcccgagacctggaacgccttgatccaggcttccgactcgtactcgacgtggttctcggccgcccgcttggtcgggttcatctcggtaaagatggcgagcagccggaggacctcttcgatcatacgcggcgtgcgcgcgatccactgctggacgcccggcgcggcgagcagctccttgaggtgcgaaaagagcggcgaagccttcttcatcttgaaggcctccgactcgggctcaacccggaggatgtgcgccgacggcgggagcaggatccgcttgtgcgtgtactggtttgtgtagaacgagcgcaggacgagcaggtacgtcgacaggtgcgagcgcgtgcagacaatgtgggccgcgatcgacggaattggaaacagcttggacgtcagcgcgagggtcgacgtgtcggactcgcggtcggtaaagaggaacgagttgatgagcgccggaaagagctttgagagcgattcggctgaaggaggggtaagcaaggagagtcagcgaagcaaagaaaccagcgggagggaggcgcgagacgcacccatctcgagccggacgtcgttggcgctaatgccgagccgtcccatcagcatcccccactcggcacgcggccgcttccaccacttggtgtggtcgagcaggagcttttcaaaccgagtcgcgcctcggctcgcgagcgcggtgaagctctcgggcccgctcgagagcggcttggcgagggcgctgagctcgcgccagagcagccggcgccagtgctcgccctcgcacccggcgaggtcgaggagaaagctaacgatgtaggacgagacgcgctcgtgaaagttgtcctttgccggccgcatcgtcacgccgagatcgatctggctgagcgtgtgggccgcgtggaggagcgcattgatgtcgtggccgaccatgatcgtctcgcggccctcgcggtgaacgttttcggcgcattcgaagccgcggctctcgggccagccgacggcatcaccgagctggacggcgacgtcctcgcgcgtgtgcttctcgtcgttccagaggacaacggcgtagaggtcaggatagacggggatcgggtcgagcggcgtaccgataaactgcgccgtccggtgcgcgcgcgaggcgacctcggtcggatgcaggtcagacagcgggatccggggcaggtaggcgatccgggacgacgccgtcggcaagctgggctcggccggtgtcgaggcgagcgtgacgaggatgtagtcgaggagctcgccgaggagcatacggagctggcgctcagcgcattcgctgtcgacgtcgagcagctcgtcatccaagtcgttggcagagccagatgcgacgggcgtgtggaagccgcagcccggagcggaaccgcctgcttgcgagccccagatctcggtgtcaccgcacgagcaaaagtcgccggtgccggtcgcaatcttgagctgaagcgacttcgccttcgtgtagggcgagcggaggaagcatggctgacagagcagcgcgagcgagtcggtcgaggtgacgtccctacgggtcgcaggccgacagggtcagcgtggcacgtagcgtcaggtagcttagagaaactgacttgatgcggtagatgaggtcgccccgctcaaacgagcgctcgcaccggtcggcccgccagcccatcttctcgcgctcgcgctcgtcgcccggcggcggggcaagctcatcagcggcccgttccttgcctttgcccttgacgtcgcgccgtcgggcggctcgctgaaggtcaccgagcttgaccgtcgcccactcgctgctgccctggtatggtagcgcggatgacgaggggaaggccaagggcaccgctcgccggagcgttgagtagagcagatggttcaagtcaaccagcgtcgttggtgtaaatgtgtcggagctgtgaaggcaagatcgggtgcacaaaacaaggacgtcaatcgaaggggtataagatggagaggtcggtcgaggcaaggcagccgagagctcgagacggagggagggtgaggacgcactgctcgacggcgagaaccgcgaggtggtgggcgagatgaaccggctcgaaagggagagtctcctcccacggggtcgagcttggaggctcgaggccggcatactgctgtccgagcagcctatgcgaggccatgccggtcggcgaggcgtcggaccgagctcgtgtgatggccaggaggagaggaggggcgcgtgacctttcgtccgcggagactcgccgagtcgagctcgtccaaagatcttggcagggacgatgtgaacgcgaagggactgctgtcgagggctgccagaggccggtgggcaaggcaggacgagggaagccgagatgctgtcgagggcttgtcgatgtcggaagcggaggggcgcgtgtcgcgacgtcgtctctacgccgcctcgctccttcgctccctcattccatacgaccagctcgacagcacgcaatgatccacggtacggaaccgcatacacccctctccctcttccgcctgctgacacaccaccccttccacctcgcctagccaaaccccccgtggacctctcgctcttcggcggcgccgacgggcccgacccaaccgatgctgctggctccggcttcagctcatccagcccgagctcctcctcgtctgactcggactcgagcgagcagcattcgaatgcgctccggcagcgcaagtccctcccttcgacctctcagaaggaggacgagcaggaggtcgacgagcaacacaagcaggtttatgggctcgacaggagagactttctctggtcgatgaccgaggagccgcaccggtcaagacggctcgcgatcctcaaggcccatcccgaggtgcgtcgtcgggtctctctctttttggcttgctctgctttgctcgaacacgcgctgtctcggtttgggcggtgggagcaggaaagaaagaggcgggaaggggcggtgtcgagagtggcgatgagagagcgggtcgacctcgtctctcgtccttgcttgcaccggacaaatgcctcggatcgctcgctcgcctcgcccgcaagggtacgaccgaccgaaggcatcatcctcgttcttcccctcgagagggcagtcgcgagatggccggccgatgcgagctcgagggtcgagcccgcccgctcgagctgaaaagctagaggggcggaaacgcccgtcttgcatcgcatcgcatcgcatccgcccccgggcgcaaggcaacccctcgcgccgcgcgcctttgcacgctactactttctgctgggctggaggggggcgtcgaggagttggcgcgcccatctcggccaggggcggcggcggcggcttcatcttccgctagagagaaggccagaagggggggcctttcaaagccccaaaggagcaggaagcgggacctctccttcgcctttcgggcgcggggacgtgcgtctctttgtcgggcgtggtggctccttctgcggaccggcgggcgggcgcgggtttgggacaacgatgacgaacgacccaggcacggtcaacgcttcgcagtaggggtgacgagaaccatgctttcccagcagcttgcggacaaatcaagcctctccttcattgcgaccctcgtgctgacgtccttcccccccccccccccttttgcgcatctcgcttctccgaccggtggaactctttctccttcgactgttgctctcttcgctcactggcggggccttatgccccgctatggtctcttctctcgcctcctctcgctctctctgctccgtgcccgtgctcgcttcttcgccttctaggcgaaatcccttagccacttgaactccttctcgccttcaatgtaacaccgtctatagcgcctctgaccctgtgctcccatcgcatgccccgttacaccctaacctcgacgccgtccctccgacgcatgcaaccatcctgctgcgttgacgttccgccgtctgcatgcataccgagacgaacaaggttgaacctcggtggtaaaaggcattttcatcggtttgtcgttggcacgagcacttaccatctctggaataggcaacgcgtctttgtgcattcgtgtgacgtaacttttgggagtgagaagccggaacctcagttagccgtctactcgtagcttacgagacagagatgaagtgcccgaacttgatttttcttgtcaatcaggatttactgccgtcaatctttggtaaagtttgtcatttttgtgcaggggcaatgctaactctctggctttgagcaccgacctgttgatccgcatattcttgaagaatggcgttcacagaaaacggtctgctaatacggaatgggagaacctttcagtgggtcagataaattttatcagatacaagaatgttccaatggattgaacaggttctggcaggtacagaccatgattcaattgcacaattttcccttcgtggacggggtttagctcgggttatgcatatgaccgacgctccaattcagtcagcatggtcgcagtaaacgtggcactcttgatgaaagtggcgacggctttgatagagcgcttgctgcttacttgctcttcctttctgcatcaaagtaaaggaagatggcgtcaaagctggtacggcctcagactctcatcttgggggtgaagtgtttcttttagagttagcctggtgacgtcaaacgctgtgcctttttctcggtgctgatcaaaggcgatcgcccagatgacggatatttccagtcgtagtcatcatcatcacgcgctgacgcatattgtgagccaaagcactttactcgccaaagagtacgcagttcgttgtcgagcctgcgttgtatacatatcaaaaattcaatccaccaggtactgattctccactcaatctgggtgaaccatttacaagcagcgaacaatcctcttatgctcattaacttctttgcctcaacctgtattgcgacataaggtggtcatacgcttgctccgagggtgagctcgaatgcatttcaggtccgtttcgatcatagcaaatagtattgcgcaagttgcttaggctgtgaaatcactttcatgcaagcgcttcgtcgtttgaccaacatccagccaaaacgattatcattcgcacgcctggcagtacggggctttgtactatgatgattcctgtctacgatactcacacctgcagtctcgagcgacacttgacttgtgcatcgaagcgtcgaaagacatagaagacggcgccgtcggctttcaatgacagttaccacctcaaactgacaagaagctttcgttttgcagttctgaactagcagtagcacgagctcacaaaattccgcgactcttgatacttcagcacaagacctgtgctacctaccactcatcaactatatcgacctgagaacggaagtcagtccgcggtttttgcggtccaatcacaagactaaagctatctcagcgaatgtcattcttaggtcctgaagactcgcttttgtccgcgcactgataaaaaaaaaacgtgactcgcggcctgtcatacttgctttcagtattggccgacacaacatcgagaacaagaatattaatgcgacgacaatgtgctggctgcaacgaaacgaacagctgctgaagccggttctcttttctgttgcgcggtcgctgttcagagctcatcagcggttaggagcactagatactgaacatcagaaatgctcctattaatgttgttttggtccttcagccaacaatattgttggcgttcaatgctcaacgttaaccctaaccttggaaggttctatcgggctcgtatatctatgttactcaaactttcgaaggcgtctcaaactaagacgtaaagagtcgttgtactgtttggcttctgaactagaacgagggtgacgacgcctcccaagaaaagctcacttttcggtctttcggggcaaagaactggctcacactttggggaacacttgcctgcgctccgaactaaaactagaggccaaacgatcctcctgcgtggcacgaagacagtaattagctgactattcttttctgcgcgcccaattcctcggctttggcccgcgcttacaggttggtttgttttgcgtattcctaatcggatttgtcgtttacccaactgacgtcagaaggtcggtgaagagctgcttcacgttgattcgggcaactaactttgagttacggcatagtatcatcaatgcgcctgacgttgcttttgtcacccatgtttgtttcccgcctttcatcatcaatctctttcgttccttcatactaaattggccggacctgcgtgtaatgctgactattactttctatatatttgactttggctctggcgtaccaagcacattcaaccttttgctgcattatctgtcgctgaataaatattgctcgcgctatcaatgcgtttaatacgtcgagactttcgtttggacaaccatcagtcgcggccttcattatccgttttccaccgtcacttatggccccactgatgatcaatctgccatcagaaagtttctctgtcgtggcttcaacggaatgaccggaaggcgcgcccggagacgacaatggccgggaaggaagttgcggtcaacgaggtgagtcgccagctccttgttgattccccacacggtcactctgtaacgctttcttcactgccggtgatacatgaaaaacgagcgagccgcgctagacaattatttttgatgctgagcggtgggtgtttgcccggtttcccccgtacaacgtaactctgtccttcatcggaagagttatggctgaggcttagactgccctctacagaagcagtaatgcctgaccgagcgcccccctcttgcatctcaggtacgagtctattgcagaagatgccgaccggatcggtgacatttgctcattccgagtccgccttgcacttacggcccagctgccgcttgatgtcgttgccttcaagttcatccgaccataaaacaaggagagataccggttgcctggacacctgcgcgggcatgctccacctctgctcagttcgccgaggccgaccttctgagacgcacgggcaggccaatcttaccggtcgtcagggcggttgtctcaacttcagttctcgccgccgccgctctattgaccggcattgacttgcacaacggcactgatgcaacccagccagggccagctcccgcccggttcgaagcagcgcagcagccttaagtctgtgcgacctgtctcaacactcacgatggccccacacgctcgaccttccttccgactcatcacagccttctgtcgtgcgacgacctgaagaaaatcaattgtgcagcgggcggaagcatggcggaagtcgcacgggattgtgtctgtacttgttgaagttgcaacgagcggtctcgcatggcaccgagctcggccgcatcttcaaccgccggacgggcaagcaagctgctctgacgacgtcgcttataccaccctcagctgggacgatggtaattgcttcgcaatcgagcgctcatctttctttgaccgcgcgttcaaggtcgcttttctattttgacatgcgcttcggattgaacaggcgtttcgctcgacgccatgctccaggtcgtcgtcgtctttaacgtcgttgccgatggcaagattgccaaacacgttgcctcgtcttcctgtcgattgtagctgacacttcttgccgcgctcagtcagcactcagcaggcgatatattcctcgccttgcgctagctacctcaccgcttttattaccggaacccgccggtcgtccttggctcctgcaagtaccgtgcggtacggcctgcctgcccttcccgatcaagcacttctttctacgaccccgaatttgaggcgcgtcggcaggctctcgtcggcgtcatagacgctcgagcttaccccaattggctacaacggcccgcgttggcggttttgggagcagcgcatcgccgctggctcgtgacgcagggtcggcggtgattcgactggggcggcggcttaggcaattcagaaccggtgaaggcaaccacatcggcggcggcttcggccaagaagaagagggaccgggccacgccgaaaagcttggcgaggcattacagaatgagccggctagtgtcgtccctaaggtcacgggccagtcgccggtcggcttcatgcggtcgattgtgcgcgccgtcgcagtcaaaagtgccgcgagcgaggggtcgtatctgctctccccccgctggcgacaagtcgtttgtttccgacacgatcgcccgcagcttgccgatcctcgagcttcagaacaaggcgcaccttgagctctcaggcgggcgacatcggtttataccttctggcgcgatcgatcagcccatcaggcagggtttctaatagccgccagaggtttgacggcatcaacattgagcacctattcatctaggaaagcggcgcttggatagctcgcatgatgctggaaaagggcaagcaggtcgacatgtctttgatgcaggacctgccgatgacgctgcagccgcatgtgaggagcggtcaatggctccctccagccgacgaccgactcgtctttaccggccgatctgcggtctctcgagcaacagcactacgtcatcaacctgatcgcgggcgctgttgagccgagcgtcgagatcgtttacggccaggtcgcagctctggtgacgcgacaggcagtccaggaggcttacagcggcagcggcggcattaagatcatgcgctacgtcgtcaaggtgcccttgatggatttgatcctcggagttcctgctctcgcgtccaattgcggccaggtcctcacgatcaacacgatggcgacgatcgacctgatgactggccaccttatccaaggctttgtcttcctctgtcacccgtcgtgcccgaagtactctcttttcctcgtcacccgtacccgaagtacttattgatgagctgcggcggaccaacgcgccgagtaagttcaggctgcgcatggctctgcccctgcccggctcgcccttcctcagaacatttgtagtgatcgtctgggaacgagcatgtacccggagcttaactcagctcgatcgtcttttgctgacaaagctcacccacactcgttggttccgaaggcgctacggcttcagcatgcacaagattacggtgttcaacttgagggcgcccgacaaagatgggaaggcaaagccagcgacttctcgatcatcctcctttcactcgcagtcagaacctcggaacagcctggtccactctgtagtgcattgcaggcgcaacctcagccaatactatcaagagtacgtattgtggcgacgagattgaaacgtgcgcccggaatgtcgttgcaaatgcactcggacgctgacgccgttcgatgaaaccgagtcgccctcgccgaccgtaacctggtcttcgggagggttgaagccgttcgatgcggtcgagtcgcgaggtaatgcgaaccgctgctgcccttgttggagctcagcctgcccgggaagtgcagatgactgccgcggttgcgactacacgagctcgacagccgtcgtaagccaagcgggcggcgtcgacgccttggccggccaagtcgccgtaggtgcagcggacgttgaggccagcacgttcgatcctgtcgaccaggcagtgatcttcgtccggttagacggaacggcgttgaaccgctagacaggcggcggacgtcttgtgggcggtgcgtccatgaaatcatggagtgaataccaacctcgccgcacacgctgcaaactacgctacgcgagcggccgttgtgctccccgctttggtgcgacaggagcatcttcgtagttctgcatttttagttgcacccctcgcaccgcagaaacgcatgaaagctgcaatggcgccgccgaggaaggaaaggaggagcagcgaagataacggtagaagacggtgcaggtccgtaaggattgagtgtcgtctgaggggtgccttgagaaacaattaatgtcgccggtttcagaatctccaagccttaagactcttacgaggatgaagacggcgtgctaagccagagtctcgtgcaatgtttagacttaacaaagctgaccgaccgccacgaagctcgtttagctcagtggtagagcgcggcactcgtacttcgacggcatgctgaggtcaactgttcaatccagttatcgagcaattcttttgccatagtcagtcaggctctattgagatggcgcctacttcgcacatactccggggtcttcaggttgtccgcacacccccgagcggaactctgctcgacttcgtcttcggcgccgcccgtcaaccagacaagacgcaggcagaagtcatcaaggagggcggcaactccggtcgctacctcgtctctactggcaaggcagcgggagcttttcggccggaggccgttcagtatcgctcacggtcgccaagtgaattgcacgtgatttagacgttcgcaggcatcaacggtagtagcttgtggcaacgctgtgtagacaattgtagtgggtctgacggaaaaggcgccggcgaggggggaattcgagaaaaggacgttcatgctgttgaatgcgggagaaatgaggtggattagcgaaggtcattttcttgccagcgtggagtgctctggcaaaacgccctcacgtcgacattctccagcggattgtcatcttctggagaagccggcgctcgaggaccgtttatccaccgcacgcctccgcacggtgcaatcgagtgagcggctttgcgtcagccgtccgtcgccctctgcgctgaatttgtgcctgctccgtcaacgcaatcaccgataacgaagaatagacagctggcaatatgtcgacgatgtccacttgtttggggtacgtgccgttgcaaacaacgtcgttcgtcttcggacgcggctagacagtatcttgctgtctatgacgccccctcttcatggatcagcttcgacgccagcttcaaaggaaatcaatcggcgtaaactcccatccgctccccgtcgcacttttcgaatacgtcaatgaaatcttccttctttcctcctctcgcgccggccttcagcagcacgtccactcgctcggatgctggccagccgccaacggcatgctgctcagcgacaccaaaaccgaggtcgtcgtattcagccaggccgccggcgatcccccggccccgcctgcaaccgtcccagtcccacccgccgacgacccccctcgccctcgctctctccctcccagccgatctcgctcaacaacgtcagcctgcgccaaaatgagcactgaccactcgcacatcgacgcgctcgctgtaaatttgactctcgcgcgatcgtgatgccattgggctaaggatgaaggatgagggtgaacgacctctgcgttccacgagcggggtgcggcgtgccgtgtttgtcaccaccgccgtgccggtacatactggtatctcacccagaccatgtaccagtaccagaccaatagaccgactggtacggtactggtacagtgagtaatatcacgctggtaggcctaccagtatgtgacagatagacctactgatatggtactggtgtgcctactagcacaataccagtaggcaaaccagtaccataccagtatgttttcaacttttttcgcccgtccaacggactaacccctcagaacccttccaatgacctctctgactacaccccccaagcctagctgacatctgcttcattctgcgctcagggaaggctgtcgaagttgggcggaaccatactggtatgataccgctatgcctaccggtagagtcctggtatgcacactgataccctaccagtatcggtcctggtatcacaccggtctagtacactggtatgacacaccaatccatacgccgggtgacctcaggatgatgcaccgggtccacggctgtgtattgaattgtgaggcgagcgctgcccaccgagcgggccgtatttccagtggtgctcgcccggcagctgtggcggcgacgatgagtcgggcgacggggcgagaaagagcgagggcgagcgttgtccctgctgcttctgctgctctagtgtcccggcagcggcggcggcggccgcaggaccaagagggtctgctgctgctgccgctgctgctgctgccgctgccgctgctactgctgaagctgaaatccctattgcggcggctgccgaccttgcgcgcgccgggtcgctgtctgaagagtccgcgaaaatttcatggtggtgtagggcagaacagccggaacgaccacgctccgccggtggataattctcggctggtcagtgttgttgaagttgcgacgagtgcggcgcggcgcgcagagccagcggcggcagcaggcggctgcgcgcgcgctggcgaccgtgcgcctgccgatgcactcctgacgcgcggactgcatcggcattcctcctcttttctctctccctcttagcttttgtgtataagagacaggcgggtagacaaaggaagggtcaggacgagcggcaggactcactagtctggtgaatccgagtaggcgcgatgaagacaggtagaagggacgaggcgagcacccgtcagtccgttgcattcagggggcggtcacaggaggatggaggcaggcagatgtgcaggaggagttgaggaaggaattgagggagacggcgcacctcggaagcggatgagaggaggctgttgccgtctagctcgggcgctagggcgcgagtaggagaacgaagaggcgggtgcttgggtgattgagtgacttgaagttgccggtgagtcgtacagaggtgggctgagaagggctggaaggtcgagtggtatggtgggtgagggtgggatacgagcagtcagtcaggcggccgagatgcaggcgcgtcgtctcgatcaggaaccgtctgggcacgccagaggcagcctctgggtccaaagcggggttcagcgcgccgggggggtccattcggtcggccgctgcgctacaccagtcgccagccgacgcctccgcctcttgcgctgccagcatgcccttgcttggccggccagatgagctagctcctggccgaccagcccgaagagacaggccggcagcgcgccacgagcagcccctgttgagcggcggcgtgcgaacgagatgcctgttacgacagtatgcgtcgatgcggcccggggccggtcgcgctcggtctcatcagtcggccgatgcttttctttgaccctgtcaaccagttcctcctgctctcgcatcattggcgatcgacctgtacagggcgagggaggtctcctggacgagtcctgtaaggaaggagagggcgaccgcgcgcagtcggccgtcggccgccgaggtcgcactttgagtttgcgcgggctctgggaggcggatgagtcgaggctgctcctgcagcgctgccgccaagacgcgatgaggcgaggggcagcgagatgccagcgagacgaggatgagcatcgactgttagcctggagggaggagtcagctggagagggagggcgggggggcgaggacggcgatgggcgatgctgctgaggggtgcctgatccgccagcgcgcctcgtttggtcggctatggatgcctttcaggctgaccggcgtgacaatggacgacagatcagctctgtcctggcgagctcgcgatgggagcttgatgacagcgagcgaaggggaggcaggcatggcagacgaggttgacgcctggacgctcacgctcagagcgggacgagattcgaaagccgagcagggagaggcacgccactgccgacttgctccagcatctgcgatgagcttgagatgagcgacagaccgaggcctgagagaggtgtcagaatcaggaaggtaggctgcgagggtgggaagcgggcatattgtgagagtcagccgggagctggcagagagcaagaggcgggccgggcaaggcgctgcggagggcaacgcttcactcgtacgcactcccgccctcggccgcaactctctctttcctctctcgcgccggcgaccgcttgctgcctttcaattacggcctatggaccgcggtctcatcgagatgaaggggcatggagtcatcgcactcggacgcctgcgcccacggcccatcgctcaacccgccgcccgctcactttgaggcgagagcggcaaggacccggtcgagcttgccctcgacctctgccagccggtcgaggacggcccagttactcgggcccgcagtatcgtcgtcgtccgactcgccttccggcgtcggctcgcgtggcggagggactgcgagcaggcgcgagggttgaagggtcaggccgccagcaaggagtcttcgcggacacaagcagaagagagaacgtacacggccggaactcgatgccctggatcacaaagacccgagcctcgccctcgcccgccatctttggtgctgcggctgagcggcaaaagcaatatgtcgagaagtcagcctgacgggacgcggagggcggcctagaaggcaggacagaccttcaaagacgacattgcagttcttgattgcctcgccaggactcagcagcgggggcatcgtgctcccgagccgctcgagcgccggccggaacgtcgacgtgtacgaggtccagaatgcgccctgcgagacgtgcgctgtcgacgaggcgacaaatgtccgctgcagcctgcggccagaggcaggcaaagagtcagcagccggttgccttcgaaacgtcagcagccgatcggacttaccactccttgtagcgctccggctctggcaccttggccaggcgatcaatctcgtcgtcgctctgctcgaggatgcccttgtagcgctccttctcggcctgctcacgtcgcgcgcgcttcgacacccgccctgccttgccgtcgctggccggccgcttcgagctcgacgcagcgggagtcggctcgggcgcgacaggtggtggagcaggcgacggagctggcgggggacgggagagcaacgcctggtgggcgagcatcaggtcctggcaggtcggcacatggatcaactcttcgcatcagacacgagagagcagggaggtagacgaacgaggacggcggcgacaatcttctcgagcgccttccggttgcgctcctcgctctcctccttgccagcgtcgacctcggtcgcctcctttttgacgccaccgttgtcggtcgccccgttttcggccggagcggacgcttccggtggcgtcgctgatgggaggtactgcttgaggtcggcaacgatgacgctcgcactggaggtgcgtaggagagtcgatggcggagttggaggcaaggccaggcagacgacgcgtcgcgcggttggctgtcagcactctcgatcaagggccagcgtgactcaaggaaagtgcaggacagacgagaacgccaggaagggcttggaaaggtgctggagcagcgacgggagcctctgtcaagagccggagcaagggtgcctcgacgggtcagctcgtcgcgatggcagcgctaggatggcagcagctaccacgcaccgagatcagcgagctcattccggccgcattgctcgccggatcctggacctgatcagcacgacggagcaggcaggtcagactcgtgcctacgaccgagcacgctcctctggagagagggaggaaggcagacgcaccagccgctggaggtcatggacccaggcctcaccctcgggcttgagcgcggccggcaggcacgcgatggcgaggttgggcaggagctcgagcgtcgagagcgaagccatcgggtgcgagagcggtctggaggagctgctgctgctgctgttgctggcttggtacggttgggcagaggcggcgaggcgagagtcgagagttgaggaggggtcgacggtgctgggtccctgccggcgcgtcgtcgtcttcgcacggcgcaggaggcggtggtgaggcaggcaggcggtcgatagcatgaccggccgtccgtcaatcaggccacacatcccgcaggtcaggagctcgtctctcgacctgccgctttctctcccgtctctcagccgttgcgctggttaggcaggaggtgaggtcgcgctgccactctccctttcgcgtctcgagcctgctgcgccttcgagcgggcctctcgtctagcagatgggcggagtgggtcgaccctctgacgatgccgcctggcccacgtcggcagcgactggctgaaagcctggctgaaatccaggagctcggagcagaagcgacctgctcatcggtgcgagacgacctcactactggccgtctgcaccctctgttgtcggctccccgccagggcggcgtttcaaagcgcgcccgcttctcgccgacctgctgctgtacgccgacgaccgacgtcgacctttccctcagcgaacgccgtcgcccgacccagattctcggtccaagcccacctttgcccgctcgtacctcgtcaaccccctcggccgaacgcgatggacggtcagggctcgttcccgtcggccgcgagcccatctaccgagcctccgcggcctccgacgcgcccgctcggcccaccaccggcagacggcccgttgatctcgacagcgccgccgccgctgacaatgcagcagcagcagcagcagcagccaaggccgtcgggacctcagataattctcggtccggacggcaaggagaagcagaaggaggcttgcgtcgcatgccggacgaccaaggtcagtcccgcgacggtgctcttcccttgctcgcccacggtagcggccccgccgggctggtcccgaagaccgcccgaccgaccggcttgaacgaaacggagagcatccgagctgaacccatccctcttcctcctctctcatcaggtcaagtgccatccagtgtcggaagcgtcggcgccgcacgacccgtgcaagcgatgcgtccggctctcgatcgactgcatctgtccgtctcatccaccgaagctgtgcaaggcgaccatcgccgagaggcgtcctgccccgccgctgacccctttcgccgccgccacagaccagcagaagaagcgtgggcgcaaggtcggcagcggccagaagcgcaagtcatcaacgtgcgttgcggccactctatcctcccgtttgcccccggggagggagccgaacgctgacggtcccgtaaaccttttcgcaggtcggggacggccgacgctgctggctcaggttcgggtcacaaggactctgtcggcggcgccagcggttcaagggacaagaagcgtcgccgtgacgcctcgtcggaccacgacgacgcgctcgacgacgcagcatccccgtcactgtgctcagcctcaagcgacgaggatggtgagaacgaatcaggccggccgagtaccggtcgaagcaaccacgcctcgggaaggcgtcgctcttcccacgccggcccacgccggtcgtctgtcgccgttccgaatggagctggccagcaagcgtacaacgcgcccgcctcgaccgcctacacacacgccacacagcagtcgctgtcgtccttgacgcctccgatgggcccacagcggtcgacctctacctgggagccggtggctgagtccagctcggcagcagctgctgccgcctccctcccgcctcagcgcgacgcctggggcaactttctcccgtcctcgtccgtcggtaacgtccgctaccgcgactcgagcttctacggcacgcctgagctgcctgacgaggcggcgcgggccacgctcacgccctcgtacgccgccacctcgggcgacccgacccactaccctttccctcagcagcagcggccgacatatacagtcaatcaccagttgacgccgatcgtcccgatcagaggtggcgggctgagtcctcagccaccgccgcaacaagccccgccagcgcccttgtacattgcgcacatccagccgtcatggtctgatcagcgctccgtcgtcaaccgcggcgtcgcccgttctggcggcggcgaccaggacccgtacggcttcccgccgacgccgcgtgcgcagaccatgggacctccgccgtctatgccgcccctgcagcagcagtcgcagcatccgcaacacgttccgcagcagcagcagcagcagcagcagaacgggctgtcgccgacggtctcgacgtttcgaccgagccactcgcgcaacgacggctacccaccgccctcggcccagcccatgtcggccgtgccgtcgtcgagcgcggccaccgactcctacaacaggccgtctccgtcagcctcagccgcctcgaatgggcagctggccggggcgctgcccgtcgcgagcggctcgtcgtcatcagacacgccggcctccaacggcaacaacgtcgtctttggcctccgacacctgctgaaccacccgtcgccgacgacgtctgcagcccagggctatccgcactcggcgacggctcggcgccgaacctcgtccaatacggccgatgtaggtgcccccggcctgacgatcgttggactaaagaattgcgtgccggccaacgacaactcgggcatcattccgatgtcggtcaaggaggtcctgaccggccacgttggaccctcactttccgacgacggcgaggccggcggtgagggtgaaggctggcgggccaagaagcggcgcggaatcgacgggatgctccgcgcgagcaacgactgggacacgccgctcgagatgcgcatcctcagcgaggaggacgtctttgagctgttcgagttgtgcgtcggctccggagcccttttcaggctagcttctgaggctgaccgctgcctgctgcctttcgctgcagcttccacacgcacctcaacatctttgtcgacgtcctcgactgcgcgctgcacacgcccctctttgtccgccggacgtcggccatcctcttcacgacgatcctgacgatcgcctcgcgcttccgccggccgtcgctctacacgcatctccacaagatggtcgacaacatgctcggccgtgcttttgccgagggcatcgtcgaggttggcctcatacagagcttgagcttgcttgccttctggaaagaggcggatgaccgcagcacctggcgcaaggtcggctacggtgcgtccactctctctccccgctcctcgtcgtgcagcatgactgacgcgagctatcgctccaccaacagccatccgccttgccttggagatggacctgcaccaaccgggtcctcgtccgctgccgagcgacgagcaggaggcgcgcaggatactcgtgcgtcggcgcgtcggccaagttttgccgccttgtcactgccgaccgctgacgcctccatttggaatctacgcaggaccgcgagcgcaccttcatccagctgattgcgtttgacaacacgctcttcatgcagagcaaccggccgagtgcgtttccagctacgttgccccgcctccgctctaagctgacgctggcactcgacttcaactcggcccatcggcgcagagatgatcccgcccgaatacgtgcatccgctggtccgcccgtctgtcgactgttgctcggcttgctgacatttggacgactcttccgaccttgcagacgcgacacgtgacgcgctgggcgcgcgaccacccgcagctcttttgtctctcggacgcaatgctggcggcctcggtcgagtaccagaacatctttgggtgcggctccatcttttcagtcgcgtgcccccccacagcgaaacctcagcgctgacttgtcttcacgtctgcctcttgccagcattgtcggggcctgccgcgtctcgagcgaccggctgctcaagagccagctctttgacagcgctcagggcatgagccggacgtggaaggagatctggctcgagggccctgagctccacgcgtcctgccgggtcatgctcaccttctattctcaccttgtgcgtcagcggtcttccttgccatcgtcttgattggactcctgacctcaatccttgtccctttgcgcagaccgactttgagatgtgtttactcaagcagagtctgcaagcgtccggggtcgagaccgacgtcgacgcgatggcggcgcccaccgaggccattgcctttgccgagtcggtcgctgccgcggtcaaggcgctgcggtatatggtgacggacctcaaagactacctcccgcactcgcaagacaccggtccgtctcgcttcttcagcagctagcttgcgaacgagaactgacctgctgcttgtcgtttagtcatcttcgggtctgcctcgactgctggctggctagcaaaaaacatttcgcgcatgaactacagctctcgacaagagtcgcttctcgcgatccaggccgcgatgcacctctaccggtccatctcgcagggcgaggatgccttcagctaccagtgtgcgtcctctatctcctctgaacgcccgactgcagacgctgacgatgtcgactctactagaccaattcctgcgctccctgctcgtcgtcagcagccgccaactggccgagcagcagcctgcgtcggtccctccgacgccgtcgtccgtgtcccacctccagccgcctgtcgacgtcagccgtcccaatccgacggcgccgggtgcgaaagggacgatcgacgagctgtctccgtctgcagtgcgtgcgatcttcctcacagccctcgaaggagttctcgctgatgcgctccttctcccgtccacagctcgagtcgagcctcgtcgcaccagacgcctcaatcgaggacatcctgacgatgtacgccgacgtcttcccgttttacgagagttcaaatctcgaggggacgcagacgccgagcttcagcaccgcctttgtcggcaccgccttcccgtccttctgattgtctttccttgttgtactgcatcgccgttaggctccacaggctccactcttcacgacctcgacgcatgtcgcacccctttctcaagctcctcgtctcgttaggcagcgaccatcagagacaccacccgatacagctttacttgccccacctcgacgtcttggccgccagattgggcggcgggacgagtttccctctcccgactaagccggcccacttctcgcgccgactaccgccgcccaatctggcggccaagacgtcgaggtggggcaagtaaagcgcggcggacagaggtaacagtcagcctcgcgaccgagagcgcccggcagacgactgtgggccaggagcaagagcgagggcaggggacgtacagccctgagccgtccagtccgagggcagagcaatggacgcgcttgatgcggacggcgttgaggtggtcgtcgacgcagcaggtaatgattttgcgtagacggagatccgcccggcgccgccgcaggtttggtcaattttgccggcgcagggctggaggaagcagcacgtcagcccataccatgtcgttgagggacgaggaggggtcagcgcaccatgttgcacgaccctccaactgcagtctgcgtgccgctggcccatgtcgagccgcaataacactgcgaagagaaagcgcgggacaaaagtatgagaggcgttatagggaggtctcggcaattgagtttgcacgaggatgaacgcacctccgacgagtattcgagtcccgcaaagaggaagcccttcgactcacaaaacgcgacgcacctgtaggggcagtcaagtgatcaagtggcacgtcagccacggtcgccaacggcttccatcaagggcgaggactgacatagggacggtcatgctggccgacgacgtgaaggcgccggttagtgcacgcgtgcttgcggtgtccgtcatgcatgggacggcgtgagcggcccaacccgagggcagaataagttttgcctccggcgccgagttgcgatagacggtcaatctgctcaaaccgccgcagttctcatctggtttgcctgcgcaagactatcgctcaacgcgtaagctaggctcctgatggcggcaagattggggaaacccctatacgcacagtgctgcagagatcggatctgattgtcgcatcgctcgcaccattgcggaagccgctgtcgcactgttcgtgaagcgcgagtaaagcctcagtcagcagtgagaccgccgacagagcaggggggccggcatgaaggcgagttgacgctgccgcacgtagcattcgacgccccattcggtgcctgccaagggaaggccgagcctgaagacaatgcgcgacgatcagcatcaccagtcgcctgggtcgaggggaagtgtcactcacttgtcacagaatgcgatgcaggtggcgatcgacatagttggactagtgatgctggcagcggcgagtgcacgtccagacgagccctctgcaacgcagccgactttgctccagccttgcggaatcttggagccagcgccggtgtaagaggcagcctcgacgtagccgggcgtcgaaggctgaggatcagcggccgaaggcgctggtgatcagctgcagagcccagcgaggtcagacgagagagcgtagcatggcacctttgtcgtgctgaggtcgctccacattgggttgtcgccgggcagtttgagcagcggcgtcttccagccgttcggctcgtcgacgacagctccctccggcttgcatgcagcggccgagtcgtagtccaggtgcggggcgaatacggcgcaggcattgacgtcgccgccggtctcgaggccacaggtgtcgagcgctttctggaggaccgagtcgggaccggtcggccatctgcaagtgggttcgaaggggtcagccaagcatcgcaaacagaacggaggcccgaagggccgctcgtaccccatagtaaagtctgcatgaaaactgtagccggtcgtgtcgccgttggcaaaaacccaggttggcgtgcctggcgcgttgaaggggaagtcgccgacgaggaagacctagcaaagtcgcaggctggggtcagccgggcagagaccagggcagggcgtgagaaagatgccgctcgtacccattcgtagaagagagaaacgaggtggaccggatgggtcgacgggcagttgccaccctgaaagttgtcgatcgggtaggccatgtgggattggtcgggcttgtaaaggttcttgccgtcccactgcaaggccggcggtccatcagcagctgacatcatcacttcggtcatcgttgtcgtcacgcacgcaagaggggaagaacacctgagcacgcatgccgtccgggcagttgtgctcaaaaaagttgttgcgctgctcccaggctttgtctcccgtgtgatcgtggtagtagtcaaggcagacgaacgagacggcttggtcctcgtagctgctcggatcgaaggagcgtcgaccggcttggccggcgaccattcgcaagcccttggggaaggcttggatcttctcgttcttggagccaggccgctggaggtagctaaagcagggatgacgtagcgagttagacgagcaaaaattatgtgcgctgcctaacgcagacgtactaggtgttcgagtaggacgggatggcctcataggttttctttacaggctcatagtagtagagttgcggagcctgcgacggggagagcaagggagggcaagcagcggtgagcgagaggcctgagtctttggacgaggcaggatcctcacccagtagttcgactgcaaagaagcgagcgtaggatgtcagaggtgatcggcagactcgcaagactggagaacatgagcaaagcgcaccttgtcgatcgagacgggcgccgtcgtgcacgacgacgagagcaggtcgtcatagtcgtagtcgcgcccaaagcgcgagccgccgacgatattgtgctcgtgctgagcgacgacgccaggattgacgatcgggtcgagcctgttgttggtcgacaagagggcgggcggtcagggccatcagtgacggaggaggcgtcgaggcgagcctctagcctgcctgctgcgcggcatagattgcgccgacgaacaaggcgtcgggtcgaccgacgggccctaaatgcgaggtagacgcacctcgtccggaggagcgtggcatgacggaggatgaagaacgccagcgagggctggacgtaggccgaaaagaggacgaggaaggagagctgcatggtcgaggtgacgagctgcgtcgggccggccgaagcgttctcgctttaggaggagggacggcgaggagcgaaggagcgcggagggataggtgggctgagaagcaggtcggcggctcgtcagcttaactgacagcgtcaggtagaaagagcggcacagctcgagaggcacggacgtcgcctggctgcagagggtctggagctcgttggtcgggtccgagcgcgaaaggagaaaaggagaggagagtggccgagctcgagaggaggaggctgagaggacagaaggccctcaggggtagcgctgctgctgctggtggtagggagagaggagctttcggctgagctcgatggacgacacgcgtctcgcaggcggtctctcgacgatccgttgttgaccggccttcggatttcggaggtcgaggttcgaacgtcgaggtctcagagtcgtcgcgtcgcctcgaggtcgaccggccgatgcgtcgcgcggtggcgtcggccgtcggcccgacctgccgcatgcagcaggtcattctcgcggtcatttgcctgctgcagctcgagagtactgtgctgcctttgcaacctttcgctggaatggggcctgctcccggcgtttcgtcgacgtcttcccgtccctgaaggcttcgctgctcgggaaatgcaagcacgagcatcgcgcccagacatcggcagggaccaggacggctcgcttcgtgcgtgacagtatgacgagggcctacggtctgagcaggcacgctcggcagagcgaggctgtctgccagacgggaggcatgtaatcctcaagccgcgaccatcacccgctgcccgctggcgatgccgagtttgaccccgggtggcaaagacgcgatcttctccgacactcgcgtcgggcgggtgaagcgcttcggccccgacgcgggcacgacaagggccgcgccgtcgtcaggcgagtcaccctcgagcgccgcagcggcctcgtcggcagcgagctcctcgggcgagagcggctggagctcctcaattgtaaagttgacggtcgacggcgaaggcgaggctgggtggacggtaaaggtgccaacgcgaggcagagtggctgccgtcataaactgggtgctggtcgggagcttcgcgctcgcaacgcggagggctgaaacgaggtgcgtcgagcgtcagcaacccgtcggtcgcagctcgtcggccgtccgcagtctcccatgcctgctctcgttcttcagtgacctgagcacgggctccttgtcatgtgactgccgagcagaccgcacggcctcagcgcagacatgcctctgcgcgtcagatcgcccgccgcgcaacatatgcctgcgcctccagcgctggtcggccagaccccatcacccgcctgcggcatttagcgtctggcgcgcctcacaagagccgactagggttcgagattcgctgacgtaccttctctagcgatctcgggccgcaggttgccgccgcgaagctcaaacagggcgtgattcatcggcacactgaatgaggacgatgcaatcgagcatcagcaatcattcgaggcgcgatgagacggcgggaatcagcaggacgcactggcacgcccagaagtcgaaagctcccttgccttttcccatacgagcttgggcgccctgagtgcggaagaggcgaggcggcaagtcagccggccaaagatcgcataggtggacctctgcgcatcagcgacctcatgacagggtgtagcgcaccttggcagtcactggccggtccgggaagacacgcatgatgatctcgacgcccttgaacgccttcatcttgcgccggagagcctcgtacgcggcctcgagctgcttggccttgatcctgacgccgttggtcgcccggatgccgtattcgccgccgtaggcgagcgtcgtgcccttggtcgagccgccagtgtggatcggcacacgacccttcatcgcattcatgccgtgcttggtccgctttggcgcgaacttgatgccgcgcgactggccgccgaccgaggtcggggccgagggcgagaaggttggcggggcgaggaacgacggccggaggagagctcggcaggacgacgacgacgacgacgacgagccggccgcggtcgagaccgaggacgaggctgcaacgctgcgtaagctagggagaaagaaggacatattgctggaggaggggtcaagagagacagagagcgggcgatgcgaaggagggcggccgagctgtcgcgcggaggacgagacgaggaacccgtcgtctcgatggtcagactgtgttgatgcatcgccatggagactccggcccttgccggcccccttttctatgccgggtggtcgcccacgccaactgcctcgctcccttgctcaaggtcggctgccggaccgagggcggcctgaccgtcatcctcgtcccgcgccaggagggcgtcgagaccaaacagatgtcgacgcgctactcgaaggcggccggcaccgcctacattacgtttgacaatgtccgtcgcccgccgcctttcgtgtcttgccaggcttgacagcgtcgtccttgttctcaggcgcgtcctgccgaggacaagggaagaaataaactgacaagctgaccggacgaggacgggcgctgccgctgacctctcgacgaacgcccgccccctctcgaagctcgtcctctgctcgccatgctcgcctcaggcttcgtcaacagctcacccgacatggcctagctccagcaagatttgagcagcactggctggagcagccttcgcggtcaggcctcctccctccctccggcgcgccgtatcagcgactcaccggtccgctgcgctattgtagacctcgacactcgccgccatcaccagcaaacaatccctcgaacgccgtctcctccagcctctcgtcttcgcgcctgtcgcaagccgccttggggctcaccgtagccaggagtcacggcaaagtcatgcgcttggctgcatcccagctcgccacgttggtagggaaaaggtaactctgacgaccacaaccttgaggacgtcgaaggggcgcagcgggtggtggtcgtcttaattcgacgatgactgcccatcagctcctccagccgtccgacttcctccaatcggtctcgacctcggacgtttgtccgacctcgaacttgtcgaagataggtcgcacgacgacggcgagctcgaggctcagcggtcgtcggcgcttcgacagagggatgaggtgtccgacctactcgggcttatgctcgactcgctgcttctcgaggccggtcactcgaccgagccgccgttctccttgcgcttcactgtcgcgcctcaaagtccgcggccggctcggcggaagggcgtctgtcagccccttcgactcaaccggatcgcctcggccgactttcccccttccgccttcgacatcctcgacttcttccatcctctcgtacaattcctcaccaagctcctcgatcgcgtcgccctcgccgacttcttgttcttcggacgacgaggcgctgcgtaccccggatggcaatcgttggctgacttgggacgtcaacttgacgccgtggatgctcgagtcgcctccatggtcggcctcctcctcggtcacaacgctagggggcgaccccatcccttcaccgccatttgccgaagcccagccttctcgccgctcgatttcgtccctagctccggaagcaaagcgtccggcaagtctcgtggagacgctcaatcggctcaactctatccttatcccaagcagccagaccaacaggcccctcaaaacgtctgcgcatccgttcgccggcccgcttactagctcgtggaatcggccttcgagaccggctccgcctcctctcgcacccttcgctgttcctgcctgcgccgggccgacgggcggcgacagtacacgctcgtccgcatgctcgaagccgtcgccgccatcgtcggctgccactccgggacgacctttaccccgacggagcccgcttccatcacaagcgctcttcaggctcgttcagtcggatccatgaacccttctcgtcaaatcagcaaagtgaagaggcatctgatggcgagggaggcgtttctctgatcgtgccgtgcttgccggtctctccccctcctgaggatgaggtgcgcgcgaagcagtcgaaacccctttgtcgagctatcagtgccaagcctgaccgaagtagctctcgaggacggcacgagcgacgttgaagccaagcagctggtgaggagatgagagagggcgacagtaacagtcagcggattgcgactgccgccagcttgttgagtcacatacgcaccgagaggatgtagccgacgagaatcggcagcagtggcgcgagcaaaagctctgcccgctgcaggaacggcagagccgcgtagccgaggtatgtgatgtagatgtactgggcgctcgcaagcaggtagagcgagttgccgagccagaggcagacccagttgctacgcggggcaaagaaagccaagggtcgaaaggtcatcagcgaattgcttccttcgaccggcagacatgaggctgtcgagccaccaactgacctgcgcgtgatgaggccgacgaagagcaattggccgacgtagatccaaagaaagaaggtgaagaaggcgttgacggcgacgtcaaaggcgaacgcccactcgactcgggcgtctgaaggcgacgagtgcgagcccggcgacaagagcagcttgttggcgatgaacctggagcagacggcaggaagagcttgggatgtcagctctggaaagacgcggccgatcggcgacgcaagattcgacccagacgcaccacaagacggtcgcgacgactgcgcttgcgagcaggaagtcgcggaagaccatgagcaggacggtgacgaccgtctggccggccgtcaggccgtgcacgtagctccatagcgtgccgacgagcgcaagcgcgagcgcgatcaggacgaccatcgccgggtcgtcgcgtgcccactggttcttggtctgcttgtggtggtaaacgttgcggtatctagagaaggtgcattggagcgatcagcgtcactcgggcatggggccaggggtgagcgagcgagacgtacactcggcgtgggctgatgatcaggtagctgagctgccaggccgcgagctcaaagtccatgcggccgaccttggtgagcttgcgcagcgtcgagaagccgtagcggctgccgccgccgccgacgacgaagcggagcggcgaggccgacgatgatgatgatccgacagacgaggacccgagcgagccgttcaggggcaacagggacggggccatccggagggacgaaggggtgcgccggaagagttgcggcgagctgaacgcggatatgatgccgaaaggttgacgcggacggagcagagccgaccggaggggctaaggctagagaagcggctgttgaccagcgaaggagcggtcgttgaggaaggagaggtaccggccggagaacgagatggctgtcggtcgggcgccagagcaaggggagccggtcgagctcgacctcgcaacgggggggggggaggcagaagggtggagggaggcgggacgcgccctgctcgtcggacatgacgggtaggtttgtccttgcttgcactgggagacgaacgagagggtcagacgctgggcttttagtcgactgaaagggatgcgtttgaggcgggaggacagacgggcatgttcttgctggagccgccactggtacaccgtctcgagcgcaggggggacaatctgccgggccacatcacgcgcgggcgactcgtcagcccctctacgctcgatcaaacatggaggcatgacgcgcacctgaatgaacgtatcgagcgcggcccaccaatcctcgtacggcttgagcgcctcgttcgtttcgagtagactctcgagcgagaaccgcatgaagcgcctctcgtcgcctgctgcctcttgctgggcgtgcgcgtagccctggctgaggacggccggctcgagcgctttgaagcctaacatccagccctcgaggaggacgacgtcgaccggcgcgtggacgactgtcgaccggctcggcggcgcccggtcgccttcgcctccgtgctgagctttgtcgaacgacggaatgacgacaactgcatcggatggatcggtcctctcgctcgatgttggccggccggagagagcgagcgactcgaggatctgcgagccgagcggcaggtcgtgtgtccccggcaggccacggccctggaggagcgcgttgtgcgggtgggcttgggcgagctcaaccagttgcgcgtgcgggaggtagaggtcgtcgatcgagaaggagacgagcgagaggttgtgtgctggtccgcggaggaggtcgcgcagggcgtcggtcaggaacgtcttgccctagcgatgcgagagatggagagtcagccagcgtcgggcgagggcgagatggagggaagaaagggaagacggcgctcaccgagccttgcgggccctggacaccgacaaagagcggagggatgacctcggctccggcatgctttgtccggtggcgcgcaaagttgaggaggacgtggtcggccatcagaagggcggccggagggacgccagggaaggccaaggaggaggaggagcaggaagaggaggaggccatcttgcgcagcagcagcagcggcgtcggggagggctggaggaggtggtgctgccgggggaggacgagtcgagtgcgagcgagtgagagcgacgacgtcttggagagaggtgatcctggcttaaggacttgctgctagctacgagggtctcgtcgaggcgggacgagatgctggtcgaacggtcgacgaggttgactagctcggctcgaagctccgtttgctcgtgcttcgccgcgctgctcaacgacaaccgccgcccaacgccttcctcgccgccctcaaggcttcccttctttaagcacaagaccgggttccgagtagtagagcacgtcgtgaggaagttcgttccagtcctgcgcttggttctgggaggcggagggttgcaagagccccgaggtgctcgccgcagcgtcctcggccgagctcgccctcaccctcgtctcttcgcctcgcctcgagctgacttcgagcgctttcgtctggtcagagaagagagaccgctaaggctgacctagagccgtctcaggacatgtcgcaatcgaccccccgggcacctcgcctctccggaatcccgaccgggctcccaacaccacgaggctcggccctgcccacgccccgccgcagcctcggcggcagcagcgccctccacggccacgccagctcgagcacgtcgagcgacacagagtcgtcgcgcgcgctgtccgaggcgatgcgccagaacccgccatcggcgttcaggtcgccgaccatctctgccgcagcggcggccgccgccggcgagccgtcgtcgtcaacctcttctccagcgacgggctcggccgtcggcagccggacaccctcagtcgcgtctcgtcgaccaggcggcgctgcatctggctcgatggcgcctcctctccctcggacacctggtaacccgtcgtccttcctccggagctcgtctgcgatgggctcgagcgcggcttatccgtcgaccccgaccgccgcccgcggagctgcagcacgccggtcttccctcgcgccgacctcgctcagcagccgatcagagagccgtcagcaagaggaccgcaagccctcttccctctcgcggagcgtcgtcggctcgtcggcggcgaacttccaggtcggcgagcgcgtgcggataacgtccatggggctcgaaggcacgctccgctttgccgggacgatcgacggcaagaatggcacttgggccggcgtcgagctcagcggcaactttgccggccggggcaagaatgatggctcggtcgatgggtgcggcatctctgtggtttgagacggccctcataggctttcttttgctcctggcgctgatctctacccctctctctcgcgccctcgcagcaaggcctacttcacatgcccgccgcaatgcggcgtcttcatcctctactcgcgtctcgagccgccaacaattggcgagctgggtagcgtgccccgcccagactcagtcgcctcgtcgcggagctcagtccgcgaaagcggccgggcgacgccctccattaacggccgagcgacaccttcgatcaacggtcgagcgacgccgtcgacctcgggccggctgacgccctcgctcggcgcaatgcctcctccgcgccagacgccaaggacggcgacaaagacctcggccgaggcgagcgcagcggcccaggcgaacatcaccgccggttcacgagcgagcaaatacgtcggttcgtgctcgatctcctctcttgccgacctgccgagcgctgaccgtccccatgagtgcactttgttaggcatgacggccaagcagttgagcgcccgctcgacgctcgactcgagcacgacgagcacgattggctcgctctcgcgctcgacgagcacgctcgccaagtcgtccaacgttctcaacaagtcgctgagcgcgacccctcgcgcgccccgactctccggcgcggttggcatcggcctgccgaccccgacccgagcagggccgcgcatgtcgatgtcgaaccttgcgacgccggctaggagcggtcgaacgtcggctgccggcgtcaggcgagctgcaggaccggttccagagatgccgccgccgccttcgccgacaaagtcggtcaggtcatcgggctacggccggccggcgagtcgccaatccgatgcgttctcgtcgcggcccgccagccgcgcgtcagagtcgcggccgccgacgccgcacgaagcctcgttctcggcgctcgacgcgagcggctcggcgctccaggatcgcatctccagcttgatggcctcgacgtcgtcgtcatcgccggcgggcaacaggccgtcactgttcaacggaccgtcgctcctaacagaggaggacctcaaggttacctcgccccctcaccaacagggccggatcgatcagctcctccagcggatcgacgcgctcgagaaggaaaacctcagcctcgtcctcgaccggggcaagacgcccgaggcgaggacctcgcttccgctcccggacgacagcgatgcctcgactggcgccgcgcctgacccggctgtcgctgcggccgagtcgcgggccgttaacgccgagcgacaggtccaagcgcacgtcacgcggctgactatcctcgagtccgagctgagcgccgcctcgtcgacgtcgcaaaacctccaggcggcgatccagacgctcgagcaggcggccgcaaccgcggtcgaggaccgagcgcgtgccgaagcagagtcaaagcaggtcgcgcgagacgcgtcggcgaagctcgaggaggccgatgcgctcgtctccagtctcaagcaggcggtcgaggctcagacaaagggcgacagcgatcactcggccgaggtccaggccaaggcgaaggagattgagatcttgcagggcaaggtcgctcggctcggcggcgaccttgacagggagcgtggcgagctgcgggatgagattgaggcgctgaaacgtgccggccaggtgcgtgcccttccggttgaaatcccacgctgccatagacgtcgctgacaagccctggacacctcacaggacacgatcgccctctacgaggagcgcctgaatgcggccgagtcgatgcggctcgacatggagagccttgtccgcgcccgggatgaagagctcaaccgcagtgcccggacggaccggtccgacatgccgccctcgcccccgccgttcctccgccagcagagcacggccgccgagatcgacaacgagaacctgacggagcaggttgcgcacctcaacaaacggatcgccgacttcgaagaccagatcgaagacttccaggcgcaggccgagcgcgacgaagagacgttccgcgccaagctcgagaaggcccgggcggccgagcgcgaggtccacgccgagctcgttgctatgcgggcagagcgggatgaggctgctcaggccgaggcggcggcgaagcagcgtgttgaggagatcgaggtcgctcttgcgagcaacaagtcgacgctcgagagcgctcgggccgaaatcgagagcctgcgggccgaagtcgccgtgcgtgtcgtcagatgcgccccatctatgaagagtaaccctgctgacgacctcacctgcttcctcctcgcagaacctcgagaacctccagggcgcgtcgcaaggcgacgaccgcgcgcgcgaggtcgagaagcacgccgagaaagagcgttcgctcctcaaagccgagatcagccttctcgggagcctcgtcgaggacgtccagcgcgccaagcgcgaggcggccgagagcaactcgacttcagcagccgaagccgcacagcttcgggtcgagctcgccgaggccaagtcggactttcactcggcgctcgaggagaacgacgaccttctccagcagattgaggacctcaaggccaaggcggccgataccgacgggctcgaagagctccacgagcagcagacaaagaacatcgagctccgcgaacggatcggtgccctgcagaaggacctcgaggctgcccgtggcgcttccgacgccggccgtgtagtccctgctggcgcttcgaatgctgacctgcagctcgaggcgagcagcgaggagaaccggctcctgctcgccgaggtcgaggacctaagagaggtgcgccagccgtcggtcgccacgtcgtcccatcattgactctcgcctgttttgcccctcaatcaggccgtcaggtcgctcgaggagctcatggaagacaggatcatggccgaggagacaaagctcgacggtgccgcagcgtcagacgagggttcgtcggctgaggccgacaagctgcgcaaggcgctcgccgacgcccaggccaagctcgagtcgcaggcgctcaagtaccaagtaagtctcagccgcaatggctacagctctcacacgcgtgctgacgacgccctttcctcctcagtccgactttgaccacctgcaaaagaaggtcggcgacatcgaccgcaagaaccagcaagaggtccaggaggtcggtcgcctgatcttgtcgcggacttcactcgcttgctgacctcttgccttgtgacgcagctcgaaagcctgatcgagtccaagatttaccgcgaggacgagctcgagcgcgagatcgagacgctcaagtacgagctcgcacgggcgtcgtccgcctcccgcgcagagtcgtcgtcctcgcgccggcgcgatagcgacgagccagcaccggcgctcggcagcttcgccgccaagacggcaagcctgcagggtgcgtgccgtctgccggtatcggcgctttggatctctcgctgacgccaattgcctcttctcgcagacacatgcgagctctgcgacgagcccgggcacgaggtcgaatactgcccccgtgggtccctcctgtcatcgactgtcccgctccgtgccgcgctgacgtgcaccctcctgcctcgcagtcttctctagcagcctcggccagaatcgaaacggcggacgctcgcctctcgcgcacaagacgtctgacagcggccggtcgaccggcgcagacgagggaccgtggtgcgaggactgcgaggcgtacgggcacgcgaccgaggactgcgagtacgcccaggaggtcttctgaagccgaactgctcccgcatcggtcatctcgcgtccctctcagttttgctgcccctcgtcggggcgcacctttcttctctatctttctttgcttgcatcccttcgcttgcctcttgggctctcttgcttctccctctccctctgctcgcgcgcatgcatggcaatgctctttcctcccaccccttcttacttgatgaccatcttgaccttccgctggaccgagcgcggcgtgaaagccaagctggcggccatccggctggcaaggccgtcgagatcatcgtcctcggcgacctccctgtcggcttttggcgtcgtccgagcaggagcggccgaaggctggggaggttcgatcgacatcggtgcgttctgctcgtgcgctgacgaaacgacgtgtggtggccgcaggagggaggcggccatgccttgagtgagcagcagctggccgatctgagggtaacaggtcagggtgcggacggggtgtcgagtcagcggcactcgctttgcgcgacaggacaaagacacgcactccaactttgacgacgccgaaaaagtactctctcgggtagagatgcttgtcaatcatgtgcagccggcggccctttggcgtccgcgaccggtggtcgcagagcgcggacggcagcaggcactcgtactgcgcggagacgaaggacgacgctgatcagggaggggccaaggtaagcgaggctgaagattcgacgactgacgatgcgctctccccgggcagccagctcggccagcagtggattgtggaactcgttctggtgctgcccgacgcaagaggaaggcgggagttagggcggagttcgggagcaaggtgcgacagctcgcaggaccgccagagacatacgagctcgagcagtctccgctcggggaagacgcagccacaatgtctctcgttcattctgcctttgccttttgcgtccagacccgacatgccgctgctactgctgccaccgccgacgatggcctcacaggcgagctcgtggacgcgagcgtagtgcgcttcgagctcccttgccgtcgcgaaatgctgcggcttggccgcacaggtcggcttgagcgagcacgtccagctgagctctgacggcgcggcgctgaagagccttgactgcttgtgggccggggtcgagagcgacaacgacgacgaggtgctgcggccatcatcgctgctgctgctgctgctgccggcggatgaggccgacgagaccgagtgcgaccggcgtcgcttctgcagcatcgccgagcgtggcgccaggcagcttctagtagctgaagagcgctcgagcactgctctgtttactctgagaagtagtcaaggaggagcaggtggcttggcgggcaggtcgacgttgctgggcaacctcgtttgagcttcgctcggcctcacctcctctcgccctcctgacgtcgaccttgccctccgcttgaccagcctcaacgacttgtcaacgaacgcttcaacaggcttcagttctcgagccgataagaccttcttgaacgcagcaccagccgccagtaatcgacttgcccagctggccgcctgatcgccggctcagcctcgacccgccccctccgacccgctttccccttcagcccgaccttcgatggagtcgaagccacctgcgtctgcttcaagtctgtcaggccaagcgacagatcgcgtgatggcgtcgtccctcgctccgtcggcggccgcaaccggctcgaagccagccggcagcaaggcggcggcggcagcagcggccaaggccatcgtcaagcactcttcgttctcgtcttccctgccgtcggacctcgagctgctccgcaagctcaagcagacgatcgcctcgggcgctcatcccgagttctcggccatcatcaagccgaccgcccagaaagctgtcactgtcagccgcgaagaggccgaccacctgtgggagctcgcctccggcgatggcctcagtggtgcggaggcctctgatctcgctcgggtccggcgcgaggaaggagaagtcagacagaggaatgtcgaagagcttgtgcggttggagaagaataaagttgaggacgagcgccggcggatcgagcaggaggcccgggacgctcaagctcgggctcgggccgagacggcaaagatgatcctggacgccaaggaggccgagcggttcaagactctcgaagagtcgcgcaggatcaaggaggagtttcgcaagcgtaagctcgccgaggaggaggccgacaaggcctatcgtgtgtgccgctcatcctaatcgcttccggacgagctgttgacgtcgcaaccccccccccccccccctcccccccatcatactcctggccccctccggcgccatactctggcccgccgccccagctcccctcacgaaggttcttgccgcccctcttcccgcgcggccgcttaccattctcgtcgagctggtcgagccggcctggacttgcgcctagcggcggaggagcgccggccgggttaccaaaggccggaggagggaaagagccgccgccggcgttgaaggacggaggctgctgaccccatccgcccggctgctggtgctggtgctgcgagggccctccgaagccgctcggacccggtccaaagccgccttgttggccgccgaacccgccctggccagggggagacgggccctgctgaccgaagcccccagggccgttgccgttgctgaagccgccgacgtgctgagccggtggtccgccctggaagccgccgccaccgccggggggtggacggaagccgccttgcggtggtggcgggccattgttgaagccgctgccgccctgagctggcggaggggcgttgccgccggagcctgggggtccgcctggcccgccgctgaacccgccggcagcctgctgtgccggcggccgaatcattcctgctccagcactccatgacccttgcggccctggccccggctggccgaacgcgccggatgacggcggcggctggcgctgctgcccgctccagccctgctgttgaggaggcgggggtggtccgccggagccagagccgagcgtgtagtccggctcgccccgccctgagattgcggtcggcggcggaggaaggccctgcctcgcgcctccgagtccgggcaggccgccctgcacctgttgcgggaagccgccgccgccgctggaaggcaagggcgggaaggcgtttggcgggaactggacgccgcccgggaagggtgcaccgcctgggccgccgccgggcgcggcattgaagtttccgccgagaccggggagcggatcgactgttgaacagaaggaaggatgggatcagccctcggttgcggaaagtaggagtgagctggcgagtcacgaacagcgcggggccttcatccttgcctcagccgcgagccgatcctgctccttcttgagccgggccttctcctgtgcctcctgactcgccagcacgcggttgtacgttccgccgccaagtccacctccaccgccgtagcccgcggcctggccgttgcctggatcctcgtccgccggccggttccggcaccaaaagcgcgttgtaaagtcctgcgagccgctcgcgagtacgtggccgagcggatgccagtcgatcgaccagatctgggagtcgtgcgccttttcgaggacgacccgaggcgcagaggacgcgagcgtccagtggatgagcgtcccgtcaaagtcgccggatgagaggacgtcgtggtgaatcggatgccaggcgacgcaggcgacgtccttcttgtgaccgttaaggacctcgagctgcttgaacgtccggatgtcaaagactctgaccgaggtatcgcgcgagccggtcgcgacgaggttgccattagggttccaggtcgcagacaggacgctgttcttgtggagatatgacgcaagcgcctggccggagcgcgggtcccagaacgagaccttgtcgtcggtagaaccgctgacgatgagcccctttgagggatgccagtcgacacaccggacgtcctggccgtggcctcgccaggcacgctcctcgcgccgctgctcgaagtcccagatccggacaaagccgtcgtcgccgaccgagacgaatttatcatccgagggcgagaaggagagggcgcggcacgagtggccggcgtgaccggggagggcggcgaggttgttcatgttcgactgaaagtctgcggacaggcggggggcggggggctgttagcgccagcaggcggcagagatctccgcgcaagagaaaaggaccaacacttgatctggcccgaatcctcggacgagacgaggtaccgcgacgaatggctccagcagattgctcggatcggcgagtcgtgcgcctggaggatcgtctcaaagttgaaggcgagaccgttccagagcgtgaactcgcccgactgggagcccgtcaggacacgccggccctcaggcgtccactgggggcgcggccatggggcagggtcagcacaagacgagcgcgtcaaagcaggaggtcataggacaatgaggagcgcaccttgacgacgttgacgggcgagcggatcttgttgatcgacgaatggacaaatttctcggcgagcgatgtgctcgaattggtcggataggcagctggcggtagaagctgcgacggggtcgggcacggggtcaggtccagctctgcctgaaggagcaggggcgacgcgttgggcagaggcagcgatgcctcgctccccttgctccgaccgagcgttcatgcagaagaggagcacaggaagggaacgcacgtcgatcgtgaactcggggtcattccgggcgtagggcgtgtactgggcatgaggccggaccttgcgcagctgcggtcggggagaagggggatgcaggcaagcaggacgagcggttggcatcagcccgccgaaggcacaccagcccagacccggtcgaactcccagcgtgacaagccatcggcccgcccaggccatcagtgagcaggacgcacgaggttccacttgcccatctcgccaaagtagtcgatcgtccgccgcgccctcagcttcttgctcgagtttgagtagtcgcggttgttaaactcggactggtgactctggcggaaggcgagctcggcctggtaggcgagctgcgaacgatcatcttgcggaggcggcttggcgggcccaaagacctttgtcgggtgccagagcgaggagggcggggcgggaaggagggagggagccgacgacgaagaggacgaggacgaggccgccggcattgacgccggcggagggagagcctccatcatggcctgacgaggtcgtccaggttccggtgggacgtatacgatggaacggagtcgtctcctgactggccgaagagatgtctgctcgagaactggaagaaggggcgaggcaaggcaggaggtctggatgctgtcggccggctcagcttcgctgcttggaacctcctgctccagcacccgccgacaccgacctgcgctttcgatccgactcttcgctctgcacaaacagctcaatagactcgcatacagacacctatctctctctatcagcgccggtcgtatcctcgctagccctcagcttcgcctttctccctcgcgccaatggcaatcccagctcccctccaggcgtctgcccgctcagcctaccgccacgtcctccgttcgacaaagatcctctgtgccggtcagtctccttcgtctttccggccgagtcttgatggcgttgctccgcgatcgacgcgtgcgaggtgcttccgggggttcgatagcgcgaacgaggaggcaggctcgacctcctgattctcctcccctcaccctgctcttgctccgacagccggcggcgacgacaatgccgctgccgccagtatcgacgtcgacgcggctcaaggcaacagctgctgaccagcctctctccctttgcattccttaggtgacccccacggtctctcgatcgctcgcggcaagctccgcgcagagtatgagtcgaagcgggccgagtcggacgcccgggcgtttgaggcaaacgtcgcgcacgcaagggaggtcggcgacctgctgctgaggcacgtcgtccagggcaaggagaaggagcagggcgtttatggtctgtcctcaatcgctctttcctttgggtagaagccgctcggtcgcagcgcagagcggcgcagcgcagagagccagatgcaagcccgctgactccccctcccttaatcttctcgcagatctccagatcctcccgacgaccgaggtcggctcaaacgactcgatccgcaaggcaaagacgtctgcccggccggaaagcgagcgcaagtcgccgtttccgaataggctgaagaaggcgggcgggccgaggaccgagtgagggcatcggctagacatgtcgttaccaaacgctgtgggctgaggaagggcgacggaggtgtaggatgagcgtgcgtgcatgtcggccgacgagggagagcgaggtgtgcgtcggttggtcgtcgaacggacgaccggtgcgtaggcacggacgctgcccgatcgagtgcagcctatggatcgaggcgcaaagggcaactgcgctcgtgctctgccctcgcttgccccctcgatcctcacgctcgcttcagctcggcgtctgcatgacatcggtgagcgctatagctcacagcatagcgctcacagcgccgtctgtcaatcgcagcctcttgtgcgccaaagggtgtcaggaacgagccgcatacgagaggattcgataagcagggggcatcaagggtcgtcaaagaggacaacggaggggtcatcgcgtagaaaggtacaagagagaattgtcgaccgtcgtcatgagcgccggcggtactttccgtcgcctttcctgtggtccggagagaaggaagacgaggtcagcgcttctgcggtgtccgccgcccgtatcgtaccagtctcaaaagtgtcggcacgtaggggaaaagacgtacgccgcctccgtttcgatccgctttcgcttctcggccgctcgccggcttgcctcggcgttgatcgcgtcaatctggtcgtcgtcgaacatgcccgtttcgaagtactgcggcctgcggggtgagccagaggggtctgatcagcgtcgaaaacggcaggtgaggccgagagcgaggggggaggaacaggagggacaaacggcgtttgtggagcggcgaactcctcccggtggcgtgagacggcctggcggtgttgctcgacgccctctgcgcgctcgcggcgcgccttctccgcggccgactcgtccgccggtgctcctaaagcaggggcggccgcgcgacgccagacggggccggagggaagggcaggaagcgggccgactgcttcgtaatactgtcgcgtggggcagggggaggctcctcgttagcgggtgtgctgggtttgggaaggcaggcggggagggcgagacgcacgcctcgacagcactcgcagtcggtcccgtgcatctgccgccgctcgtcgcgagtccggacgacgctgttaaacgctgagggagagagagacggttgaccatcagttcagcaagggaggaggcgagatgaagggaaaggaggacggaccgtagtcgcgaccctgattgcgctcggggtcgatctcaaagtctcggttgatcgtccggtcggcgtccctagagaagggtggagcagggatcagtggtctgcacatggggaatggaagtgcaagggagacccacgtctggcccccgtctgcgtaccgccctcggcccttgaacatcccaaacagcgccctgacctcctccgccggcttatccctcagactccggttgaacgccttgcgctcggcggcagacatgccctttgtcgggccctcgagcgcgcggtagcgggcggcctcggcggcttcttcggacgacgtgcggttccatgctggccgggacgcaggcggcgagtcggggacgaggatggggatgtgcgcgttgggcacattcgcgcggaaggtggtcactgagtcaaggggctcggttttgatgaccggctgagcgggcgaagtggaggacgacgccgctgccgatgccagatccaatgcgcgccctttgcccttccttcgtcggctttcgtcatccccgccaacagccggcggaccccttgcgaccgccgccgccgcgtcgaagccaaacgcaagcggccgaaccccgccgtcccggaccggcgtgtcaatgtcggcgtcaaagtcgtccgcttccccgtccccctcgcggcgaacatcgagcttgcgcttcccgccggcgttgggcccaagcgcagacagcggcgtcggcggcccgtcgcgcacgcgctcgtcaaagatgtgtcgaccgagccagcgctccttgcccgacttggtcgtcgacgacgtcggtccgaccgctgacgtgccagcatgcgcgctgggcggcggtcgacggcttgaggtggctgcgctcggctgagcagcggttggtgttgccttgggccttcgctcggcggcggcggtggagggccgagctcccgtctctggtgtagggaggtgcgacgtcggccctgatcgcccgcctagtcgatgagcggccgctggcgtcatgttgttgccgccaacaccgtcgtcaacgactgtacggctaggcgccgccggcgccgctgcggaggggggacgagcatctggcgccgcctcggcctcgacgcgccggcgcttcgcaggcggcggcagcgacggcgtaagcagctgccctgcaggccgagcttggccgccttggttagagggagaagcgatgaagtcatcctcatcctgctcccgggcggcgatggcagcggtgggttcgaccgcagatgcaacagcagaggccgatgccaactgcttctgccgttcccagcgctccgactcgcgctcgacgaggtcgagcagccgctggtcaaccgcgttcaacacagcacctggtcgcgcagcggcgatggtgccgggggtgcgacgggttggccaggatgcactagggcaggcggcatcgaagcggtaggacgcacgctcttgcgggaccgacgtgccgacaaagtcgttttcatcctcctctcctccgttcatgtcgacgtcggcgtccgccaggaaaggcgagcggccgccgggcgagctcgagagaggcgtgagggatgatacggactctgaggctcggacgaggatgcggcctgtcctgccaacgggggcgacagcgcaatcagggctggccgtcaacggcggcggcggtgatggaagtggtggcggcggcggcgccatcgagggtgccgaaagggcgaagcggtgctgcgaaggaagtgcaggaggtgcactcggagccaagccgaatggccgcggtggactgggcactggctcttgctcttgctctgccgacgctcgccgctgctcgtgccgcacctcgaccagttctggcgccttcggcacgtcggacgggatgggcgacggcggcactcgaggggttgtcgaaggcaccgctggccggtcgccggaggaagggccggctgccggccttggcgtcggcggtgcgggtgagaggaatgggttggcgtcggcgtcgagcatgtcgagggcggcggcggccgtcggatcagaggtgtcagcggcagcggcaggctgagaagccgcctgcaaggtcaccgacgcaagtccaagcgctgcacgaggtgagcgcgtcattggaggcggaggtgccggccgagtcgcggcgctcgacgtcgggaacggcatcgtcggcggcggacgggccgagctcgtaaacgggttccaagccggcgccgtcaaagcaggctccttggcacacgtctgcacgccaggcgggacctccgccttcctgctctgctgatacagctcgacgaccttgccggtgaactgacgccagtgacgccggtccgaacggtgctgagcctgccgcgcacggagcgcctcgcggagagaggcattctgagcgagaaggagggcggcagggggcgttggaggtgcggcggcaggcgggatgttgaactgaggagaggcaggaaggttggccttgcgcgagggggtgagtaggcgggaggaggcgtctggcttcttggccggtgatggggagccaacgacgagaggaggagcaggatatttgccagccgtcgctgcttcgagctcctcgcaccttcgcccccagcctgccgccgccaactcggcttcacgccgcccgtccttcgcgtcctcgactgcccgctcgagcgcctcctgcccttcccacgcggcccgcgcatctgctagcccggccgcgagcgcatcggcgaggtcggcggtcgagttcgagagggaatggagggcagggatgccgcctggagggagagggtgcgatgtgaggtaggccgagagagatgagggagaactgaagccgagctgctggaggagctgggccgagtcgatggagggtgacgtcgtgctgggatcggcgggggcggcctgagcagtagagcccgacgagatcgcagcgggaatagcggccagctggccagtcttgatggctccaagctcgactcgtagatcagcctcgacctgagccgactcgctcttgaggcctgcaatcgacgggaggacagcgcgcagtggccaggtcagccgaacggagcaccgcgcgagagcgggagcgacatcggaccgacggcggtaggcccgctcccagtcgtcgttggccgcgacgagctggctcaggacgtcttgcgcccggcgccggagcttgctggcgggcgagtcggtcgttgccatcgcaggcaggcaggcaatagcgggtgctcgcggatgggtgggaggggcaaggaaggagggggcgtcggagaggagatggcgactgggagggggccgacgaccccttgcgccgtccctccgcggttgagctcgagcagccccagcgagtccctttctctcgcagcagcatgcaaaggagctatcatgtaagaacccatacagtcaggtcccaaaggacaagcaacagggtctgatcagagaagcaacgccggctctgggctgagctcgtgcgggggacgcgcgcagcactaccctcgacgtgagccgccgacccgacaacatgcgacgtgggcgcagagaggggtcgaccagcgaccttctggcccatttcgggcttgacgcgagacgtccgagaaacgaacagtctttgccagggtggggggcggagtcggaggggaaggccaatgcgacagaggcgacatgcacgtgaaggaggctggctctacgtcgtttgcctcccgagcgggctgccgctgctgttcgacaccctcggccctcgcgggcccttcattggtgtccccaccgtcaccgtgcgcgatccctcaggcgagccgacccgggccttgctctttgcaagcgtcgacgccgtcggctggagaagcctcgatgttgaagcgtccagctgcgcctgcgggctgagcttgttggaaggcctgagaacggtgcgggagggcgtcgcggtggctgatgaggtgaagggggaggaagaggcgtctggccgaccggctgttgggctggcgacacggcgcgaaatggagctggccggcgtcgacggtctgctgcgggttgcgagcagaattgccgagcgcgccggcggcgaagacgatgctggagccggtcgggcagacggcctgctgctgctgctgctgctgctgctgctgctgctgggagcggcactctggcgagaagaggccgtccctgcccgttgggtcagggaagccgcgacccgtgcgacggggcttgtcgttgtcgcctttcccggagttgaagcgccagaagacaagcctgccgaccggcgggtctgacggtgcgcaaaggcagaggtcggacgcatgtatcctggcgccgccgagccggagagctggacgtctcctcgcgtgagaaggcgcttggaagttgattgcgttgccgaagaggaggttggggaggatggagggcactggtcgaccgtcgctgccgtcggagaagaaggcgtcgcaacaggagagacttccttcggagagcggatcggagatgtcgatcgtccgtcaccggtcgaggacacatcgccagcgcccgggtcgagggcgctgggaccggctgacgttgtcgggaagctaccagattcacctttgatctgggcgggaacagagtcggtcgagtgcgtctcctgcccctgcggctcctcggtcgtctaaagcccgagcgcgagcacatggaagcgcaggtcaaaacgtcagcgccactcttctccagcgtgggagacggcaaacgtacctctccatcttcaaaggccatcgacctcttctccgccttgctgtcaactacgatctccaaggcgcctgcagttgcatcttgggcgggcgagcgaggtcgggctgggtcgaccggcgtcggggggacgacctcgatcgcgacccgatactccggagcgggtgacgatggcctttccgcgggatccgttgaggcgcgagactcatgagagtcattcttgtgtacgtcaagcgttgggctagacgtttctccctcgtctggtcgatcgagctggaggccgttgccctcgcgtgcattgctgctgacggcgatcgaagcagcggagactatcggggccggcgatgaagaagaggcgtcaaagttgcggcggccgtcgaacgaagcacaaggcgacgcgaccgtctcgggcgagggcgaagctctcgaccgattgctcgacgacgccccggcagaagcctccccgacccgctcgcttccgccggcggctacaggaccaccgccgacctttgctccgagaaggcgctcgagctcgtcgctcacccgccgatctcctaggaccgactttgagctcgccctccgcggcctcgaggacgggctgatggtcgagggctgttggcctgagccctcggcggcggcgacggcggatggcaagccgagcccgagcccggcagctgccactcgcgaggaaacaccgtcaagcgacggcctgcccgacgacggcgagctcgaggcagactgagctccggccgcctgcgcccagggcccagatgagacgcgcttcgacacgctttctgagcgctcgagcccgcgcaggcgccgctcgcgctcgacagcgcccgatccggccgtcgtaagcgtcggcggactgccagaggagcctgcttgcgcgaataatggcgagctggcggtcaggtttgatggcgaggaaggggagggggagccgggtgagccggcctgggcttggaacttggcgagcaaggcggcgacacctccttttgagggcgtgcctgcggccgacggacggaaggggcttgggttcggcccgtctgtgggtggcaacctgcgggcgggagccttaactgaatcagcgcctagtctcggcacaaatcgatcgcagggtcaagacggacatgaggacgagtcagatgcttgcatggctgctcggacggaaggcacgtcgttgcacgaagagaggcgcgttgctcgctcgtttggcgggttcccacgctgccttcagccttcgccgtgtcttcggcccgacgctccgaccctctccctcctcctgaccatcaccttcaccctccctgagccatgtcgaagcacactgccactgaaggcatagattctcgcaccattgtataccccggcccgcccatcctgcgctgccaaaccgagctcggtgaagggcccgtttgggatgcgagggagaagatcctctactttggtccgcccagcctgccgtgccgaggtccgaccgagagctccagaggctgaccgaatctcgctcgcctggccccgctcctttgctcgcccagtcgacatcccaaaggtttgtcgcattcagcctctctcagacagtcgcgacttgtctttggtgcccctagcttcgctaccccgaacagccgcaatctcgcgcttccgccaggagctcgggctgactcctccccacgtgcctgcaccattgacagggcgagatccacacgtttgacccggcgactaacgcccacacgaaagagtcgtacggcaagccaatcggcaacatccagctgagaaacagcaagcccggggtaaggccactcttcctccctctctctgactagcgggctgcgggcgggcgggggacgtgcaggccaaggccggtctcgacattgtttgaaaccactcttgtgtcctcacatttcccttacggagactgacctcctacccctttttcttcgctctgcctgttcccccgcagctcctcgtagccgcctcgcgcgagctctaccggaccttgcctgcaaagccaggccttctcttcccggtggccgagccggtcccggcgtcgtcgcgctgcaaacagttcaacgacggctactgcgaccgggtcggaaggtggctgacggggacaaagagcgacgagaagcccgggagcgaagggacgggcggtcagtccctgtcggcttccctttgctcgcgctgtcccgaggtcattcgcctcggccgcgcagcaacccttcgctgacctcttctgtctactcgttctcgagacagacctctactcgttccacgcagacgggacgtctcacctcctgattcctgacctgaccgtctcaaacggcctcgccttctcgcccgacgacacgctcctctacttcatcgacacgccgtccggcaagctcgaagtggtcgactatgaccttgcgagcgggacggtcgatcttggaagcagaaggacgcttgtcaagctcccgcgggcgccagtggcagagaagggcgaaaagcggggcgagggcgggtttgatgggatgtgcgcggacgaggagggcaacctttacgtcgcgctttggcagcgtgcgttcaatcccccccttctcgtcctcaccccttatcatcaagctgaatcccctcttcttctcctttccgtgccctccgcccgccagggtccgtcctctaccgctactcgccaaaaggcgagctgacgctcgaaatccgcttcccgcacgcgtccaacatcaccgcccccgtctttggcggcgaaaacatggacaccttgtgcgtttcctgcggggcactcacgcccggactatcgtcgtcgaacagaacagcagtcaactgagacttctccttctttcgctccctgcacgcgcgcgcacgcttaacgaaggttcataacgaccgcctcgtgcctcgcctcaaacgagccgcatctcgtcgcgcgctacccagaaggcggcgacctctacgccgtccagctgccggacggggcgcgcggccgcgagaagtttcgatgtgcctgggagggggccgacgagtgagggctgctggcccgagcattcgggacctgctccacccttctcctcttccgtcggattgggcggcttctttgtttaggattttccttttgcatcactctggatgttcacaacgtgcccgtcgtcgcgccctccgaaagcaggtagcctgttcgactgactgagtaacagtggcgaggcggcagacttcgccccaggagagcgagaaaggaaagagcaatcggatctcatagggctacagaagcttggcgaggcgcaagcaaggaggagggcgaagcggcgaggaggtgccaacaactggtcgtctcagcgacgagggcggcgccgatgcccaatttctgcgcgcgctcaagccgccgccttctggccctcggtctcctgccgggcccggtggctcgcgagcaccttctggtacgtcgcgtcccaagcgtgcttgccgcccgtctcgatgacgtcgccgtggcagggaatgagccggtcccagtcccagctcgagacgatcgaggcggcgtgctcataggcgctgtcgaagggggccaaagacagggtcaatgacgcgtgtagggaaggaaggggaagtcaaggcaagagccgcagacgcacgcagagtccttcatcccgagcgccttcatgccccactggctggcgaggctgcccggagcgacgaggctcgtcaccttggaccagatcgtgccgtcagccttttgctcggccgaaggcaggttcatcaggaggtcggcttggatgagcgacttgctcggcttgtggaggaaggcgatgtcctgttgagccatgcaaggtcagtaaagagggacgggcgtcaaccgcaggacccgcgagaccgtgcgagccgggccggggccgggactttaggaatgaaccttattcatgtgcgcctcgaagaagcacgactcaatctcgtcctcgaagccaaagcgctcgttcggtccggcgagtccgtttgtcgtgtactcgccggcgaccttgagccgcttctcgtccttgaacttgtctgcgaggcccttggggccgatgacgagcgccgtcgggtacgccgtcgcatagtcgacgaggaacattgtgtgttcaatgtcgtacgcgacaatgtacttgacgtttccgccgagctgggcgatgccggccttggttggctcgtcgagtggcgtcgaggcgccgagccaaagctcgcccgacgcgagcttaatgcacgtcgaccgaccgccaaactcgacgaggccgagccgccggaaggggacgctgaagatggtgattgcgggagagagggcgcggacgacggcagagtcggaggagccggtcatggttgggcggaggggtgggtgggcgagctgaaggcggatggataggccggaggagggcgagaggcttgctgagtgtgctgagggtgctgagggtggtggtggtggtcgagtggtagcgagtgctcgctcggctgctctcgatggccgtccttggggaatgacgtctctgcggctgccccttaccgagccgtttcagccggactccaccgcccgatggcccatctcgccctcttctccctccgaaccatcacaccctcgcacctctaaaatacacactcgcacaccatgactgcagcatccgatctcaaggagggcgacgacgtcaggtccgtctcctgccgctcactgctagctcggctcacgcggcctcagccagccagccagccagcccaggcgagccagccctcccttcccgccgtcctcccgccctgaccgccgcccatccatccatccatccatccatccatccatcccctcctccgcatcgtagctggaaatggggttcgtcccacccctccggcaccgtcgccgacgtcgtcgagggcgacgcgaccatcacaacgcagaagggcaacgaggtgacgcgccacggctcgaaggccgacccggccgtcgtcatcgacaatgctggcagcggtggcaaccaggccgtcaaggacgcgcatgagctcgatggggtcgagacgggcggcaacggaggaggagggggcaagaaggcggatgacgatgatgacaagaaagacgacaagaagacgtccaaggttcgtccgcccgcccctgctcccttcgctgctccacgcctgccctcctggaccagatggccgggcttcgatcccgcgtccttcgccatccttcccttattcaagcgactgacggtcctttcccctctccgctctcgctcctatctggtgctcgcctcactttcttctgtctcgcccacttagtcaacctcgaagaagcccgcgtcttcatcgagcaaaaagcctgcctccaagggcagcaagaaggccgatgacaaggccaaggacgacgacaaggaggacgccgaagccgaggagaagaaggccgaggctgaggagaaggacgacgccgaggagaaggccgagaacaagagcacgaagtctgcgtcggcggcgagcaagaagaaggctgcggcgccggccaaggacgacgctgagccgacgcgcaagtcgagccgggtcgcggcgaagaaggctgacgacggaggcgacaagaaggccgacgagggggcgggtggggcgaagaagggaggctcaacgaagaagaaggccgctgatggcgacaaggacaaagcagaggacgacgaggccgaggacgacgaggacgacgacgaggccaagacgggcgagaagcgcaagtcgccgcctgcctcgaagagtaagaagccgagctcgaccgcctcggcgaaaaaggtcaagaagtagtcgactcgcttctttgcccgactgcctttgaccatccgagccccacttgtctcttgtgctcctgtctcctgtcgcctgttgcctcttcctttgtctgtatgccccccttctaccctctttgactgtctgtacgctgggctgaaagttaaagtgatgtgtagcagctgcaaacctttggcagttgaaatggacgaggcaggaggctgttgatcgagcatagcagacagtgtgggacaagagccggcgaggagccagagagaccggaatgaagcacccgagaggattgaatctgcgcttgagggagatagagtagaaggagggtcaaggggacctgagagggaagtagcggctctagccgcggccgatgaagggcatgttggtcgccctgggcacacgaaagagcaagtgacaagcaagcaaacgtgtcagcgcccactctcacaccacgaacgcgcgaggacaggcagaaggagaaagcggacggacatgatggtcatgttggcgacgtttgtgccctcggggaggccggcgaggtagacgaccgcgcgggcaacttcgtcaaccgggaagcccggctcgagggcaaggtggccgtcggactggacctgattacgggcaggcgggcggaggacagtcagtcgacctgaaactcgagcgacagcaagcaaggaagccttcgcgaacggaattgagcgcggaccgacctttggcttgtcaaccgaccccagcgccgtgaccgcgttgccaatgtcgatctggcagcaggcgatgccgaacggccggccgtcgagctgcgtgcatttcgttaggcccgagatggcgtgctttgagatagtgtaaggggcggagtctgagtgtgcggggaacgaaggggattagcaatgagcagaaggaaagtgagaggtgggagcgagaggacagactcggccgaggagcgtaggccgatatcgagccgttgtctgagcgcggttgaagagcggaagcgacaggaatcttcagctcacgtggacttgcctcgatcgagcgcaaaagtcgacgaatgcggacgactgactgatgatccgccctccctgcggctcctgacccttgaacgcccgcattgcgcccatcgtcatcagcactgcgccccggacgttgacggccatgacgcggtcaaactcggcgatggggagctcgtcgagcggcgggttggcggagtcgacgccggcgttcttgtagtggagggggggctcccccacctcccccctcctaacacagcttccgcccgttcttgctctcgctgacgcgccctgcggttgcgcccccggcggcagatcggcgaaggctccggctgggcccgctgggacctcgcaaactggcagccggccgccctctcgtcgctccgcgaggcctcgctcgaggacgacgacgaaaaggccgaggacgggctcgtcgatagcgcggtcgaggtcaggcgggaccgggtccggctgagagtctaccggagcgtgctcggctcggcttagggccggagctcggaggggacagctgttctcgcacgcttaaaacgggaggacgatgacggggaacggagttcactcgacgtcgaagtctgttgatgaggtcaccgctggcagaatctcgtctctgctcgatttgagcagggaagcaagcatcgcaccaaatcgtgctgacgagcgtgcccgtctgaggaggccaagacgtctgtttgtagagcgacgctcaccggcagcgtgtcaagagaaaggctcattcgagatagtggagcgtgacgcggttcgacagaggcggcggcgtgcgagtctgcacgcaaggagaaaaagaggcggcaccgcccagcgagaagcagcggcggcgacgacgacgggagtgcgccgccttctttgccccgctcagtcgcgcttcgacgcaccgcctccgccggcggcaagcacgctcgggagcggctcggatccgaccgacgagaggagcgcgaccgagccgacggcgacgaacacgaggaggataagggtgaagaggatgagggcgaaggagcttcgttcagaggacagcggtcagcgatgcgaaacgggagcgcgaggagagatgcacaagaacggacgcacgacgagatgtccttcttctcgcaccgggcgcccgcccactgcgtcacgccgtccttctcgtcggtcgcgccgcactcgcacgagaagcacgtcttacccgcgcgcttcgtgccgacgcactcgccgcggcccgagcaggcgtcggtcgcattcttgcaggcgccgaccgtcgtgaagcactcgtcgatcgagaagacggggccggagccgatgcgcttcggcggctcggcagcggcggcaacctgccggcgggcgagcggagaacgccggccggtagtggtgccgggcggggtgaggatgaggatgaatggctgctggtcggccgccgccgtgaggctcgcgatggacgcctcgaggaccgactcggccgccttgcgctgatcggacccggccgggagactcgcgggcgagtcgaccttgagcgcctcaaacgaacgggcatcggacgacggggtagagagctcatcgacccactgcgagagaccctcgagctgaagcttgatcgtctggctcacgtctggaagaggtagcggcgcacgtggagccgctggtcagcaagcgagagagcgagcagagcgcagaggccgagcgacgtaccatcagacgagaggtcgaagacgtcgagcagaaaattgggcacatggactttctcgaccgcggcggcgagcgagtcgagcacggcagccgctcggtggaggaagggcccgagcagctggtcgatcgaagaggctgacgtctgggtgagcgtaaaggtcggctcggccgtcaggaaggctgcagaggggcgagacagagggtcagctgctgatcacgattgcctttgagtatgcgagagcgaaggacggacctgatgggtcctgaacatcctggacgacgaggacccgaccccgagcgccgccttcgcctgcgactccagccgatgtgccgccgtggccaaggccggtcgccgccttaacctcgtcccacataagcccggcccacttctcgagcccgtcgagggcctcgggcaggaaggcatgccgcgtctcgccgaggtggtgggcgagaaccgacgccgcctggtcgggcgtcagcgccggcgggagattgctgctgctgctgctgctcgacggcggcgaggggtagaggtagacctgcggtgcgacgagcggcgtctgctgagccgaggcgagcgccagcgccggcaaggcggcgacgaggagcgagaggcgcattgctgaaggttctgctagaggaagagggtggtagtacagaaggaaggcgaggccatctcggctcgaatgccttgcagtcgtcgacgctcgctccggtcgtgacgcccgacaccgacaacggacctgacctgactttcccaccgactcctcgcaccccagagactcgatccggggtacgcaggccagaggacctcatcccaatcggtgcccgatgtcgctcgtctcgctcctgctttcgctctttccggcctcggcaccggccggcaagcgcctctcgcgccagctctacctcggcctcgtcatcggcttcacgctctcgctctcgtcgacctcgttcgccctcttttaccagagccagcgcaagcgccgggcgggccgccgggccgcgcttagcgccggtgcagccgtcaacggcgacaagcggccagtcgagatgcgggctgaggaggtcgtcggaggcgtcgccggcttgatcggtgcgcacactcttccgcacgctgaacttggacagagcagagctaaccctctgatgcgccgctcgacaacctgctcctccgattggtatgctgtgaaccaggcaacacgccgctcgtccgcatcaattcgcttagcgatgcgctcggcgtcgagatcctcgttcgtcccaccgcgcagccgagcagcatggcacgcccggccccgtcggctgaccctgacccctcttccacatctttcgaatcagggaaaggcagaggtgcgtcgatctcgttgatagagactcttggggacgtagactgacttctagacgggtttgcaatcagtatctgaatccgggaggctcgccaaaggaccgcgttgcgctgcagagttagtcgccctaacttctagaggcatcgagtgggtgtgcgctgacacctagatgttcgtcctgctagtcatcgaggacgctgagactcgtgggctcctgcacccgcatactggctcgtgcatcttcgagggcaccgtcggcagcaccgggatcagcatcgcaacgattgcgagggcaaagtgagtcgccctgcgtcttcgaaggacgacaggcagtcgctgatggccttcttccggttgataggggctacgaatgcgtcatcatcatgccggacgatggtgagcgtcgaagagctcatctggctgttgccccccaactgacaggggtcttactctgatgatggtcgcactccagtggcgatggaaaaggtgcacatgctcgaagcactcggcgccaaggtcgagcgtgttcgaccggcgtcgatcatcgatgagcgccagtttgtaaacctcgcccggtcacgggcgctcgctttcggccagacggtcctgacctcgcttccggatgtcgtcgacatgacggcgaacgaggactcgacagggccgtcgacgcctgcgaccggcgagatcggcgaggagctccggccgtcggccaacggatcgaacatcgacctgagcgaagtctacgggacgctcgacggccgcggccggcggcgcgttgtcgtcgtcgacgcgaacggcggcgccgaccggggcgagacgtatggcgagacgaacgagtctgttgcctcggtcaagcgcgaggccaacctcgtcgtctctgaccgtgcatcgggcctcgagggctggaagacgggcgaggccgcaagaggcttcttcgccgatcagtttgagaatccggccaatcacgccgcgcactatacgacgacgggcccggagatctggcgccagctaaacgggaggctcgacgcgtttgtcagcggcgcgggcacaggtgggacgctcagcggcgtcggcaagtatcttaaggaggtgtcgagcgcgggcggcgccgctggcgacaggagcaagccggcggcggcgacggggacgatcaaggtcatcctgagcgatcccgaggggagcgggctgtacaacaaggtgcggcgttaaccctgctctccgccctttctctcgcggacctcgttctgacccccctctgtcctgccatctgcttgcctggcaggtcaagttcggcgtcatgttcgaccggaaggagcgcgagggcacaaagcgccggcatcaggttgacaccgtcgtcgagggcatcggaatcaaccgggtgcgccctccctgagctcgcaccgtccgatcgatccagagctaatccgtctctcgcatcttgcccttgctagatcacgcacaattttgagctcggcgaagggctcattgacgaggccttccggtgagtcccccgtctccacgtcggtcaaccaggcttctgttcacctacctctgggctgacactccttcgccctccctcctccctcaaccttcgtcgactcgcagcgtctccgacgccgacgccgtcgccatgtcgcgccatctcgtcctctctgacggcctctttctcggctcatcctcggcctgcaacctcgtcgcctgcgtccgggctgtcaaggccggcctgatcccgaagggagggacagtcgtcaccatcttatgtgacagcggcagccggcactattcaaaggtgcgtttggaaaggcgggccttgcccggttcttcgcgtgcgacgacaagctgagggcagcgctgacctgctcccttcttctccttcaccttctccccttgcaacctgcccgctaaagttctggtccgacgactacctccgcgcgcacaacattccgatcggctcgtcgatcgcccatctcctcgcgggcgacgacagcggaggatcgggtggagggagctcttagatgctcatttggaagatggtcggatgagcggaaggggcaatggcgggctcgcgggctgtcgtctggtgcctcttgcgtcagtcggacgatggcgacgtgtccagtctgtctctaagcgcgtctccgcctggcgacgggccagctcgtttgttgtgagcggcacgggctctgctgaagtgctgcctctgccgcgtcgtcgccgtcgctggcacgcggaggcggtccgtctcatcgccccgttgcaccgagccaacccgacggcgcgcgaaaggagacgaacgggtcgaggcctttcgtggcggagacgagggctgaaagtgcgatcgagcgcgaagcggctggactggcggatgcggctttattgggcagcaaggcgcgcgcgcgacgggcgcggcagacgacctgcccagctgtcactcttgctagcagcagcagcgcagactcgattgtggtcggctggctctttttctgcgaacgcctcgcggaagctggcttcccctcgtgcggggacctcgcctgctcgagtcgagtcggcctgcgagtgctcttgagccgatgggaggttggggtcccgaccgtggtcgggcgagaggccgacgtgggccgacggaacgcgcgaaggctgtcgggcccgctttcggcgctgccgagcgctttaaagggagagggcgagccttgatcctcttctcttctctctcatctaccaactctctctctctctctctctctctctctcctcctcctccttctcctccaccctctcctacccactcgttcatcatgcccaaccaggactaccaggtcagtctggcctcgctctcactggcctggctgctgctgctgcgctcgaccatgtgatcatcgtcccttcccgctgacaccctgtctgtcctcttctcgctctctcttagttcctcggcaaggagctcaagtcgctctcccaggccggcttcgacatgtgcgtcgcccggctcgttcctttcctctcccttgcgcgctcgtagcggccatcgcacctcttgtcacacgacccgaccgcgggtgctccagccgtttcgcgccgcgcgcgcggggcggctgtgtgggggtcgtcggtctgctcgctcggccgtcggcggtcgctgcactcgtcccttctcgtcgcctcacctcgtgcactgcccgcggcaatcctcctggcaaggcctcctgctgacgctgctgctctttgccacggttccttttcccacttccagggagcgcatccgtcagtcccttccttcccatgctcgcagctgccgacgttacccttcagccgactgacctcgccttactcctcgctcaccaccatcttcccagatgtcaaccggaatgcgcccgtcgccaccctctacgagcacgcgatccgcaacgagggcgccgtcatctcgtcctcaggcgcgctcatcaacttctcgggcaagaagaccggccggagtcccaaggataagcggatcgtttacgaggagacgtccaaggacgatgtctggtggggcccggtcaacatcaagatggagtgcgtcctttctcctctgctttacctctcttaccagctctcgagctgaccctcttccctttgcctctccagcgagcacacgttcgagatcaaccgcgagcgggcgatcgactacctgaatacccgcgagaacgtctacgtctttgacggctttgccggcgccgaccccaagtaccgcatcaaggtccgcgtcattgcctcgcgcgcctaccacgccctcttcatggtgcgtcccgcttctctccttccgactcgctcgctcggtcagcggctgaccttaactcttgccgctgcagaacaacatgctcatccggccgaccgaggaggagctcgagaactttggcgagcccgacttcaccatcatgaacgccggctcgttcccggccaaccggtacacgactggcatgacctcgacgacctcggtcgagatcaacttcaagcggatggagatggtcatcctcggcaccgagtacgccggcgagatgaagaagggcgtcttctcggtcatgcactacatccagcccgtcaagtttggccagctctcgcttcactcgtcggccaacgagggcatcgagaagggcgacgtcaccctcttcttcggcctctcgggcaccggcaagacgtgcgtcctcgctctctccctctcgcccatgtacgggcctcctgactgaccgacgctctttccacccttcagcaccctctcgaccgaccccaagcgggcgctcatcggcgacgacgagcatgtctggtccgacaccggcgtcttcaacatcgagggcggctgctacgccaagtgcatcaacctctcgaaggagaaggagcccgaaatctacaacgccatccgctttggctcgatcctcgagaacgtcgtctacgacccctcgaaccgcgtgcccgactacgacgacgtctcgatcaccgagaacacgcggtgcgcgtacccgatcgacttcatcgagaaccacaagaagggctcgctctcgaccaaccagccgaccaacctcgtcttcctcacgtgcgacgcctacggtgtcctcccgcccgtctcgcgcctgacgcccgagcaggcctcgtaccacttcatcgccggctacacgtcgaagacgcccggcaccgaggacggcatcgtcgagccgagcccaaccttctcgacctgctacggccagccctttatcgtcctccacccttcgcgctacgcgtcgatgctcgccgagaagatgcgcaacaacaaggccgactgctacctgctcaacactggctggaccggcggcaagttcggcaccggcaagcgctgcccgctcaagtacacgcgcgccatcgtcgacgccatccacaacggctcgctcgccaaggccgagtacaccaacttccccgtcttcaacctcgcgatcccgaccgcaatcgagggcgtcccggccgagattctcaacccccgccaggcctggccgtcgcccgaggcctttgacgccgaggccggccggctcgctggcaagttcgccgccgccttccagaagtacgaggaccaggtgacgcccgaggtcctcgctgccggtccccaggtctcgcagtagacggcttctcttcctcccttatctttctgtcctccctcttggtcaccccatcccctctctttgctttcccacaccctgttgccacatcactttcttctttctgcctctcttgtaccaactcaacctacacgagcatccaactctgcacaaccgtccccgcccttgctcgatgactatggtcgccatcatgcacctcaaccaacttttaggtctccttcagccgtgtgcgctcgtcctggagtacccggggcgtcgagctggctctggatagagtgaggtcgagcaacggagactgaggcaggaggacgcctggcacgtgattctcagcctccgtcgactctttcgtcgagtcgcgacagcccctcccgagcttcgaacctgtaccttcttccggtccttcttttatcctttcggtctgccttgctctgctctcgatcagaactagcagcccccccatcaaacccctccacctcctccacctgctttcccgtctctgctctgccttagcgtaaggtcaccaaccagtcggacaggggaaccatcatcggtggcatgtacgagaaggccgaccgtgacgggttgttgccgtgcgccgcgatgttcgccgcgcagaagtgcgcccagcgctgcaaggaaattcgcatcgccgctttgcacatcagagccgtgttactggtggaactggcaccaaaatcctcgatctcggtgcccgatcggccgtccgcgccctttcccgctcgggtatgcgcatcggccgcgctgagaacatcgccgccgttccctttcgaccgcacctgtcacaaagagaattgccggcgcgtgcctcctgccaggtcttaccctgcgtcgttcagcagatcacctgttctaccttttctctctgctttcctgctttttgtagtggatatcgtctgacaatctcgcccgcgacagatcctcagtaagcggaatccgctagcgaatcctgtccggccggctgacccggtgtatctcaaggtaaggaaagatatcccttcccatccggaacgttactcggtcacaagtcttccttccacaaatgccctggtacgcttgccatggtcctcacgctgctctccgaccgttcacgagcgcgagggtgggcgagaggtgcgaattcggcgactgctgacttgagccctactgaccgctctctggtctggaactcgggaactcgtagcagtgcaaagctaatagctggtatttcgcgcgtatctacgagagggcgcgtgtgtgtgaagcaaacgaaagatcaaacataggttacccgtcaatatatccgagctttgcggtaggaagacatttgtcgggcaggaaagaaaggagcagcaggctgggatgtaaactcgtacctcacgaagaggatgaggaagggatgtgtgccatcgccttgatctcgatcagtgcctccggggcagcgagggccttgacgccaacggctgtccagagcggcgggtggttcgggaagatgcggagaagcgttccaatgatggccatctgcgcagcctgatcgagctcgacaacataggttgtgatctgccgcagtcgaggtggtggaggtcagaattgcgtgaccgcggcatatcctcgacgttgagggccggaaacgtacttcgacgacattttccagcgtcgctccgcagtccttgagcgcgagctcaatgttcttgaacgtctggtcgacctgcgcctcgattccctcgcgccagacaaagcgttcgccagcggccgggtcacaaccgcctgcagaggaccgcaagatctggtcaacggggcaggccggtcgcttcgaatgctggtcgggcctgcagggaactgaagacgcactttgacccgagagatggacgtaagtgccgccggctgggatgacgaccgcctgtgagaagtggaaatcgcgggcgagccattcgccctgaacgccggagtgcttgaaggtaaggtgtgacatagattgctgtcctaaatagaatgctgggggatgatgggcaagacatcgaaccagggctcaggcgaggccttatatatgaaaggctgtcgctccttcgcccctcgctccgaaagacggcacctcgcgctcgacggcctcgccggcgattggctcagtcagcacgggtgccgagcctctgtgttgggtttgagtttgaacggtgcctgagcggccgagcccgagcctccacttctgtccggcctgcgcggccgacacgcgtgcgatcgggcaccgcaataactgagcgcgcggcgaagggggcagacgtgcgcctttgataaaccctgcctccactgccctctagctactagacacttccaggccggggctcgggcttcagatctaggcgcaagatcgccggctgacttgaacgggagcacagacacaggccgtggcagctacagaagcgagacttgcatctcaagcgagacttgcatctccatcgaccgtcttcttgctcctgtttaactcgcctcccatctcctcgccctcgctcgtcctcacacaagccctcagccatgtctcctccctgcaactttgacaaggtgtgaagcagcaagcctccttccctggcaagttgctttcaacacaagctaaccgtcgcttcatcaccattgcctgccttcctctcctgcccttttctcgttcagactcgaccagcgaggaggccgccgagcattacaaggccgaaatcaagggcaagaacattctcatcaccggtgcctcgcccaacagcatcggcgtcgccttccttcaagccgtcagccgacactcgcctggcctacctgtcctcgccggccgctcacgtgaagctcttgcacaggttgaagccaagctcctcgaagagacgccagagctcaagaccaggctgctcgttgtcgagttcgcgtcgctcgtctcggttcgcaaggctgccgccgaggtgcttgcctaccgcgagacgatggacgtcactttgatgaacgccggcgttatgaacacgcccgagggtaagacggccgatggtacgtatcttcccgcattgtgccttgaccatgtggaactgatccggcgcccttcccgctttctctctcttaccggcatctaaacgcaatctggtgtcaatcacgtcggtcccttcctgttcatcaaccttcttcttgaggataaaagcaagctggccccgccacggatcatcattgtctcgtccagtgcccagagctacttaaccaagggcatcaaattcgaccagccgggggtttaacattggccagaaggacagctactccaaagctgaagcatatgtctagtctaaggctgccaatgtcctttacgcggcttcgcttcaccaatgcgggtgggaggcggtctctctgcatccagaaatcattggtaccaatctcgtccgccacatgaccatcgaggactacaaagcggcgggtaagtcgtcccgttcatgtttgctctacgttcgtcgcggcgctggctgacaagtaccttggctgctttgctgatggcgtttgaaggctgggtcgacaagaatggcaactaaaacacaaacattgagtccagcgtttgtgggttcccaagtgagccgtcttctcggcttcccgctgggtcgtgtcgtatgcctcgaggcgttcgagtttgctgactcgttcgagcgccgcctgcaggcgctcctctagcagcatcgcctcgttgcggacctcgacctcgacggcgattgtttacgccactaggttgaaggccagatgcctgaggccgaccgctgatgcgtaagcttggtcgaagatcggccgccagacaggcaggtatggatggttctcgtcttcataggatggcagagagctggcaggcgagcggggctggaggtcgtagggcatgttcgtcgggttagggtagagagagggaagagtgttgatgagactccttctctcctaatcctgctccgctccttatcaggccctttgtaggcttttcggccagtcaactcggccggtcgactcggccggttggcccatcaaagggaaggccaacgaggcgggcgcctttcatcgacagaggttcgtccctttcatcgtcttgttcgacctcggccccccttggacgcggatggcaggtaactgaccgatattacccccatggcctgcaggtagtaggcaaatgccggcgtcccttcatgaccgccaagtcgtaagtccgctctcctcgcaataaagagacatgaccgttcggcttccttaatggctgacgaactgcgtctcttcaatctgctcgtcttgccctttgccattaagctcgaagagccggccaagctcgcggccggggaacagccggtcgttgctggagaaaatcggccacaacaagtacgtatggaagacgtcaaactcaaatgtttccgttgcgtaacagacagccaggcagatcgagacggtcaattgtccctttgacgacttcggccgttattctgaaagactcaatatacttgggcgctgactcgcggctccgtctctttgacagcgatctccctgcggaagtactcgaagcctccttccttgatctcggacatggtccggtgccggtgtgcagacgacgtctgctcggttcgcgcatcaatgacagcgttgtaagtggcgagcgaggacggcccgccggatcctctcaacgtgtcgtcggacgctagggtacgtcgtcatgttggttgccgagctgccgcttcgcgcgaggtaagcaaagtcgaggtacattgggctgaacccggtcgacgcattgcgtgccaggttcatagccaattcgattcctgacagccttcgtgcccagtcacgtcgtgctgctcgcacaaggcttagcaacatctgtccaaagtcaaggttgtaccgctcgatgagtccggatggcggttgacatcttcaaggtgatctcctggaggcgactgacctcggccacaaggctgaggctgatcgcgtgtctcggtcgctgacgtgctctttgcgtgcagtttgaagacgtttcgctaagcgcctctgtcgtctctctcgcccggtcagccgatcaaacggccgtcaagtggaccttgcacgtgagttggtcgacgaagacgaggatcgtgttaaactgaccatgtctagtgtttgcctattccaaagatcggacaaagtcgagggcgatgatcgcccacggccgagcaagacctctagagcggggaggtgcctacttgatgatgcacgagtggaaacagtgttcgctaatccatcaaggttgtgtgagcccaagcgggtttcggacacactagcaactctaccggatgaggattcttttagtgtccggtcttcagttgcacctcaatgtaggtcgtagacaaactacagacgtctaagctatcttgcaaaaggcttgcttgtcttggacaaaagggacgactactgatcgcccgtgggtcatgtagggatctgttcggtcttggtctctcatgacttgctgcctttcttggactgcaattggtacttcatcgttcagcagagtcagcgtctgctggtatgacgagcgagcaatttgatagagatactggctaggtgcaacggatgtgccttgcaaaagccagcgtaggcgcagccgaggagatagtaagaccagttggtcttgatggtgatgtgattgataggctaacctgtcgagatgatgattctttgtcagatagcgtagcatacgatccgttggcgagctggacgagtgtagagagactgccgatgccatattctcagctgggcggggacgagtttgatcaccgtgatgtgcgaccatcggctgagcttggaggtgatcccagagtgctggagctgagacgctggatggccgacagcttgtctgtgtcgagcttcatcacatgaaagcttggaggaaggttgtgtgtttgctgtttggcttggctacagcgttgggtgactctttccgtctggatcgacgggccgttgccgtaggcatggaggcatccttcaaaacggcatcatcgtcgttgatgaaggctgggaataccgtttggctgatcgggtcaagtgccatatgcttggtctatgtcgctggtgtcaacgtcgtcatcgtcatcgtcatccgtgccgtcatcgtcgtcttcctgcacagctgagagacagacctaaggtgtcgatagatttcatgctctgtgcagcggaaggtttaagagacaaatgacaagaggatgacaagcccacctcaaattgcgtctttttcttggtgaagccataggttgggtgcatggtcaagctgcataaatccagcctcctgaaggatgtcaccgagggcaaggtagacccgaccggcgttgatgatattgatcttgtcgtctggggtcttgacaatgtagtagatttattccatgaccttggtgaggttgggtttatggtgggtgaaagaattcaatgtcggtcgtagaagggtgctgtagaaagcgtctgcaaaggagaagtagagatcagatcacttgtgtgctgcatcacttgaaatgctctctcgctcactcactattgcggtcgtctcttgtgtctggcagggaagtatctggggctagaggtagatgtcgatggcaggagagaagaaggtctgaaaacgggtcgtgtcttaaacgtcgggggagctatatagaatatgcgaacataaaagggaggggtcgactgctgagcatgaaagaagtccgatgacaatggcacaaaggcatccgcagtcgtcatctttttaagatccatggtgcggcctttaagggttagggctggctgctgcacgccttcaagttcagcctcacaaaagagcccctcatctgtcaatgtcctttctgatgctgttgccctttcagcttacctttgagcctactgtcactcatcgctttttgaccatctttcgatctccctcaaacctcctttgatttccttttgatcatctagtgatagtttgttgtgatccgtcgattcgccttcgatcactttggcccttcgttcagccctctcattccccctcattcttcattcttgacaggcctttgatcccagttttcttatgacattcttctcatagctgactcttccttggtcccagcttcaactcctttgatcttcttttcatccgtccaccatcggctcaaagccaagcaagcctaagcatggtcacccactcagcgcgttgaggcccagagctcagtcttcccccctttgtcgaatcccttagacgccaaagggactctccagatcgtagtatggtctcctttgtgacttgtcgttgactcaaagccacgcacgtcgtccttgtcttcattttaacctcttttagccgacatgtcgcacaagataccatccaagacgacatcggcagtctcgcccttgcccttcatcattgctatactgccttcatcgttgccaaactgccaccgccaagcgatcaatcgtcctccatcgcgacctcaaaccggagaatggtgcgtcatattttttgtcaagtgggtggccggataattagagatgtcgtccgtctgaccttcccatcccatctgcccatgccccagtcctgttggtcgctgatgggtttttggggaacagcaggacttcaatagcactcttcttgaaagttatccctggggcagtggtcgggacacgtagaccaaatgggaaggaggctgtaagcggaaaagcgctagtaattaatgaagacacacacacggtttgcctcgaaaaaggtatgagatttgagcgcaacgtaagtgatacatgcgagagctactcgacaatgttttgtatccgtacgcttcgtttcaattctttcctatgtatgctgatcttgtccaaaagattcatttgtacaccaggccgaagaaatcgccgttcttgtctcgataagatttatcgtgatactgggccttactccacagatatcaatttttatccttaaacctttttttagcattcttcgccactcatttccgctgttttcttctttcctttttgttggaatttgatcacgttgacagttcgtagggattacccttgattcatgcagtttgactggcgatccaaacccaaaccttgaagaatgagtaatcagccggcgagacattcgccctaagccctgctagataaagttgatgagatggggcacgtagttgcatgtggtgcagctgattgtggtaacaacggcatctgtattgagacgcctcctcatatcaaatcaggggcgtgcgctttgactgagccgagataagtaaaatatcaagctttgagagaagcgtcgaactagacagcgcgaaaatgccgtaaagagtgtaaggtgaagaatgtgccggaaaagcagtcagtgagtcatctgtgaaagaagtgttctgagttgttgatagagagatgaccaaaccagtgatttgttgagtaccggacgaaagggtgcaaaagaagacaatacacttttgatcttcaaacgaaagatattctattctgtagatggtcaatgattgtgctggtcgtggctcatcctgcgtgcctcttgaatgagcacgatctaccgttgccgttctccataaggagagagaaccacgtcgatgagacaaattcataaagtttgaaattggttcaacagaatgggaggaagattaggcggtagaggtgaatgttgtccagctatctgagaagtctaaacgttgaaaggtggagaataggacggtccaagattcctcgagggtctttatgtacagaggttgttttgcacttctgcgaaagggggggggggggggggggggaaagactcagtttctgcatagcccggcaaaagaagccgtagcagggaggggggcgacggggggactgcgcgtcgcgctgctcgcgcgggcgggacgttgggtgattgaaggggagcggcagcctctagcggaagaaggagggagggacgcaccggcatcgccgtagaggagatacttgagctgcgagaggagccgcgagagctcctcgtttgcctgcgaggatgtcaggcaggtcggagggtggtgagagagcagggagaggggcgtcagcggctggcctgggtcgtcgcacgaccccctgccttcctgcggctgcccgcccgcttgcccgacgtcgagctgccgcccgtcgaccggtctagacgagacttcgggcaggacagaaggcagccagtagtgaggagccgcaccttcttcctcccttcgaagccgccggtgaagtcgctcccgagccggccgctcggcgcgacgaggtcccggacggcgcgaacgagctcggccggcgtctttggtcgcttggcaaagaagttcatcctgggttgaataagggttgttggagaggtcgggggagagcgatggctgagaggtgagaggcaaaggatgccgtcgggcgagagggaggccgtcagagaggaggagaggaaagggttgagccgcgcgcgcgagaggggtggggggctttgggctgtcgagcgtgcgtcacaggggggccgagcagcaggcgatccggtccgaagcaagggagtaggagcagtaagaacagggggttctggaggtactgagggcagtggggacgggtgaaggcgagcaaatcgaatacgctcggcccttgatcagctgcgatctctctgtcgtccgcgcgcagaggcgcagcagtccctcgaagagctgtagacggccgcgttgagcgtcgcccttgtctgtcgtgtcttccgagtccatcaaggcgagagtacagaagagcgggagaggacggccatctttattgggccggtcagacaactctgaatgagtctgtacccgggactgcaggcctctatgcctcgtcgtccgactgctcccaagtgtcgtcgacctcggccggcgcagagctaggggcgacgacagcggcgtcggcaacgacggcgctaggggcagcagcgactgttggagcagcagaagcaggtacaagtgcagaagcaggcggcgcagggactgaagccggcaccgccgccgccgagggcccgtcatccgccctcttgccgggcgggacgtacgggctccccgtccggctcgcagcaggcgtcccagccgcgctcgcccgagcagatgacgcagagggcaccgtaccccacgagcgcgggacgggcgcgacgagcgacgtcgtcgatgcgagctttgcggtcgtagatggaccgccggcagcagcgccccaggctgggggaccggtcggtgctacgcctgggcgcgacgtgttgagccgagagcgtgtgggcggtgcctgactggccgagatggcggccgagaggagtgcgcccgcggcagggacgcgcgagtcgaccctccgtcggagctggaccgaccggctcggctcctggtcgacgagcgacgtctcgacccgataggcctctgcgagcttgcagacaaactcgcgccggacgagcggcatatgcgggagaatgagcgtcgcccgtgggccagcgacgaagtcgccgagcgccttctcgacgagggcgacaaagctcgagccgagcgcgaggccctgcgcctggagctcggccgaccactcgacgagccccgcccggtcggcccggtcgggcgagatgccgagcgcgagtgcgagccgctcgttgcgcgcagccttgtggcagtcgtcggagcacttgaggacgacggccgccttggacgagggcgaggcggtcgaggcggagcagatggcagcctgctcgcggcgcccgcacgcacagcgctggatgacgcgcgcgacgcaggcgatcgagaggtcgcacgaggcgggcgagtgacagggctgggcgcaggcgtggccgctgagggcaagcagaaagggaaccagagtcagtcagagcccctgtgagggggacaattctgaggtggacgcaccagaaccgccgcggcttgccgcacggctttgcgcaagcctcgcactcgcccggcgcgtgacaagtcttttcacaacggtgccagccgcaggcgagcagctcaccgcagacgacgccgcacgagaccttggtctgcgagcagcgggtgttctgcgacgaggcggatcagaaaggatgtcagcgtcggaatgacgataagggcgccaaagaaagcgggccgcaccttgaccgtgtttttcccgcacgcacactcgcgctctgtcaggaagacgcaaggcggacaccgctcgctctcatggcacgcatgcgcgacctttggatggccgcacgccggcggcggccggacgcacgagtacgtgcagtcaaaagtccggccgcaggcgatcggcgggaggatgacggtccggtggcaatggcagacgagctcgtcgtacgaggccatcaggcagggcgggcaggggcctgcagcagtcgaaccgagcgggaaaggtcagcacgaaggcagtcagacaggtgaggcgcagaaggacgcacccttgtggtcgagtgccggacacgaatggttgccgcacgcgagcggcttgccgcagacgagctgacacgtatgccactcgccctcgtcctcgcccccaccaaagtcgtccatcatgccctccagctgccggcgcttgcccttgcccttgccgccgccaccgcccttgtacgcgagcgggcagcagacgcggccgcactcgtgctttcggcacgaacggagtgcgacgcagcgtgtctcgcaacggacctcgctctcgcctcggagctcctcttcctggcgctgccagcagagccggcggacctgcggcgaggagtacacaagcagtcagccaacgctcgcgcaaaaatcgtcaagatagaaggggggctcacctttgactcgccacaccggcaagggagaacagcctcggcccggcatggcgcacacggcccctcatggcaggccgccgcacacgcatggccacacgccatctcgcgcgagcaaacggcgccgcacgtcggcaccttgtcgctgcagctcttgcgctcgaccttcttgccgggcggaaaggcggccagcggcgtcttgccgcacgggcaggtcgtgacgttctccggcgagagcgggcaggcgagcccggtcggcgggtgcgggtggcaggacgacgagcaagggtgaaggttgcagtcgaacgtctgagggcagggcgagtcgcacgcgtagcggccaacccaggtcggtcgggcgttgccgtcatcggcgtcgacgtcgtcggagccggaggaggaggttgaagggggtccgaagcaagtaatagactgctcgacgagctcgttgcacgacccgactcgcgcgtcgcccccacagaagcacgtcaggacctcctcgaccgcgcacggcaggcacgggccgtcatggcacggctcagcgcatgcgtgtccgttcttgccgcaggcgagctgcctcccgcaaggcttgccgcaccctcctcctgcaagcgcaagctcgccgagccccgacgtcccaccgcaccgaaccgtcatgatctggccgtgcgagccgcacgagaggcggagctcgacccggcagctcgggcatgggcctgggtggcactcgagcgggcaggggtgggcgcaggctgggcgctggcgcgagcagggggacgcgcacgagtgcggggtcgagaggcgcgggggcgagggcgagatggtcgactggcagaagcaggtgtattgccgaggcggcagggagcgcttggtctgcgagggcgagctccgggtcagcggtctacgcgaaaggcccgagcggaagaagaaacgcagagacgtacctggcagccggggcatcgccacccgccctcctcaccacccttaatactgccctcggcccactccctgatgcacttgaggtgatacactccccagcagcatgtcgtccccgccgcgccgacgggcatctcctttgtcggcatcggcgcgttcgccggcggtgcacaggaccaggtcggctgggccgggtgaatcgagccaaagcagatcgagcagtctgcgtaaggcgggtgcgaaagggcgtacgagagacgggtggcgagcgtcgcgtcttcagccggagggggcggggcgggcccccgagcgtgcgcgccagaagaggagggaccagagcgcgtctgctgctgctgctgctgcgtcggcgtcgtcgtgcccgagttcttggacgagcggttgcgtgagcgcttgccagacccaggcggaccagcagctccagcagcggcaggagcggctgacgaggacgaggcaccgccgttgtcggtcgtcgccgccgccgtcgtgagtcggccgccaaagttggcccgccgacgaccaccggcaccgccagatggaggaggctgctgatgctggccgttcgaggaccctcgagctgggcctcgctgcggctgctgagagttgccggccggaccgcgagggacgctcagcggtgaaggcgcaggtcggtcgccaccgccacttgcgccgccgcctcggggtccgcgccgaggtccacgggccgggcgagctgagccgtttggctgaccgctggcggcagaagcaggcgcggtggctgcggcggttggtgaaaggacgtccatgcgaaggggagagtgagagtcgttgatggtggtcgtcgtcggtggtggcggcgaaggaggaggtcgagaaagagcagcggagaggagcgatcgagcgcgcgggccctccaccgcctagccagccagcccgctgccaacgccatcttccctcccagtcccatacgacctcaaccagcatggagtccgttctgcctgctctcctgattgcgcagacggcaagctgacagcgctgcaccgccttcgcagtcaatccccgaccggcctctttgaggcttacgcccgcgactttgccggcctgacgggcaagctgtcgaccctcctcgcccaggacggcaagcagctcgcaggaggtgcgtccctgtcttgatcctggtccggtctatatgaaggagcgtgtgctgctgagcgacgggaaggtgatggcaggaaaacgaggcctggaggcggatgggatgggcagcactcacggggtgggtccgaccgacgagccgaagcgagtgactgacgccccgtctctcttaccaccatcacctgcccttctttctgctcgtctcgcgctcgcctgtcgcggtccttgctgtcaacgctcgactgatattactcctgatcgcggctcgcccaacgcaaccccccgtccgcgccctttccagagcccctccgctcgctcctccgcaaggtcgcgaccgacctcgacgaggccgacgagctcctctcgcagctcgaggtcgagctcgcgagcataccgacgtcggtccggccgcagtatgccgccaagtttaaagggttcaagagtcagctggctgggttgaagaagctgctggtgcgtgcagtctccctcgcagatcgagcaggccaggctgctggtagcagcagcagtggcagagggcagagacgaaggctgacctctgtcaccctctaccgccccggccgccagcgtgaaacgcgcgcctcgtcgaaccgctccgagctcctctccgacccgtccctctccgaccagccctactcggactcgccctcctcggccgactactcgacccggacgcgcctcctcgccgggaccgaccagctctcggacggcacgcgccggctcgagggcgcccagcggctcgcactcgagaccgaggacgtcggggccgacatcctccgcaacctccggggccagcgcgagcagatcgagcattcgcgcgacgtgctcgtccaggcggacgggagcatcgaccgtgcgagtgggacgctcaagaagatggtctggcggatgtatcagcaaaaggcggtcacgtgggcgatcattgccgtcctcatcctgttgatcggcctcgtcgtctggtccaagcttcggggctagacacaggccactcgccccgccgtccccctcctcgcaccacgtcttcctgcctctttctcattccggcctcttgccctcggtctacttctgcgtccctccctgttggccttcttgtatctcctgcccctcgctctctctcacgcttgcctctgtcattgcatcctacgcttcggcccttcagtcgcaaagagcagcgacggtcgtgtgtgcgcatcaacagcaagctcaatcgacgtcgggtctggcaagcccgactcatcgcccgcgtgacacattgccctgcctctgactgctccctgggagaaaaagatgcgtatcaagggaggcacatgaagatcatcgccagtctggacaggaccgcaggccgagagaagggacggcggcgaggaagggggccgacaaacgtcctcgaataccggcttgaccaagaggcctgcggccggggccgacgacggagcgtcgtcgagcggcgcaggttggacgctgcggcacggccagccggccggtcgtcgtgcgcgggcgagcgggcagagctcgctttagggtgtttggccagcgggcggccgagcctctggactccagcgtaagagcgcgcggcaggggtgcgtcttgaggctgcgaaagcggctagcggcgggcgagcgggcttcggccggaggccgacgcggggtggccgtggacaagaggcgcacagccggccttaacgcgaggtcgctggttgctccgtttcaagggaagctttaaagttgggtaggacgggggggccaagtggagtgacctccgactgcttgacgaccgctcagaggagagcagagtggccgagcgagggcgacatcgaccgccggtggaacggcgactcgggcgagcggatgagcgacgacgaccgaaggcgcatcgggatgggcgtgctctcggccgttggccggtggtgcgagagcgtgaaggcgttgaggcgtgcgcgggtgggcttgctcgagcgggctgagagagggcgagggcgaagagagaggtgggtcagcagatgcgttttgagggaggggtgggcgcggggaggtgacgcacgagcagaggcgggcgtcgatcggttgaggctgggggacatcgtgagaagattgatggcttgggcggtcgggcaggctgaggattgcgaggggctgaagaggaaggaggttgagtgcgagacgaggtgagggaagaaggtcagctccctccctcgcccgctccgcccttcttgtaggcagaggcgaggggcatcctgcccgtcttcacgatggcctggcgagctcgtcgagccgcatcgaaggcggaccgaccccgtaggctggcttggagggcggaaagtgtcgatgggcagcgagaaggcgcgagcaaaacgtcgcgtgcggctgcgctgcgctgcgcggcgtgagctcatccgcggaagtctcgctccgacgagagcgcgggccgggaagggcgaccgaccgacggcaggcgcgtgagaaccagcagatcgtcggcagcggttggccgtcttgttagctgctgcgacgaacaaagcgtgcgagcagcgagagagctgtcgtcgtgtcgtgcgagtgacaggtcaaaaagtgcgacagttgctgtcaaccgcagtggcctttgctgtcggcctcggcatcgcaagagtcagccctcccgtccactagcgctaatgccggggtgcagggcaaggcagtcagggtaagctgcaactgcatatgcgctggcgatcggtccgccgcttgaagcaggtcgtcggctcgaaggttcgccagcactcagcagacggacgtcgccggccgcggccgagcgatctgcgttgcgcatctgcgatcgacacagagggcctcgaacacggcgcgcgtcgcgtcgcgcccgcatccggtcgaccgccgtcccgtctctccctgttcctgcacgacgacagtccagggcaaagtgtggacagcacgacaagcacacaacccggccgcatccggcacctggccccatgccagcaaccgccgcgcgcgagtctgctcggcgcaggtgccggggctcacgcagaaggaatgctgacccgcagggcgtgcgccgcccttcctgaaacggccgggcgtgtctctctccatcgaccttttgccccgcccagctgcagcagggtgagggcagcaggtctctcccctcgtctcctctcacacacccaacccggctgcgaaccacgccagacaagccctcgcacgctgcagccagggcccgccctttgagctgtttcgccttttcgcctcctccccgccacaagacatccctcctctcacccctcccggcccgcccttggtgcctggatcgggtaggcggtgatgcgtgaccggcggcggctggcgagggatgtcggactcggctggaggcatcgacggcggcggcgagcgatggagagactgagctggtatgtagatcggcagaaacgggtggtgaagccagaagagggttggtcgtggtcgggaaggagcttgtccagggctcgctgcacgaagcaaggtcagcagggccggcgggctcgccgggcttgctgcgcgcgggcttcgacgccgaccacgatcgttaagcgcagtctgaagaggcaggccagcggctcactacaggtagacggttcgccggctgatcgagcgggaccttggccgtccggagtgaggtgagcaccttttcgttgagcttactgcgaagggatgcctcgaccccgccttggcctcgagcaaatgctgcgcgcgtcgcgacgtcgtggccggtgtagcggcggtggccagacgagctctcgaggctcatcgactggccgatgagctcggtattgctggccagtctgtacacagcctgctcaagaaggttcacgacctattggtcgttgcttgcctgctgggcacagggcgtcacgaaccctgacgagcttggcccggcggccgggcccgaggcgtcgaaccactttcgagccttgttttcgtcgcccctccgtccctctgaccgtcgcttcctctcccgataccgccatctcaccccttccgacaccgtcaacgatggcagccacgaagcacgccaacggcaacggaaacggcaagaccagcaccagcaacggcaaggctgtcgtctcggaggcggcccgcgcccgcgacaagctcgccgacacgcactcgcgcttcgagtttggagggccgctcggcgtgacggcgatgatgacgggcttcccgctcatgatgtgtgcgtgtctgcgctggcgggtcgtccagctgcctagactgacagcctgtccttgctcgtcgtcggtcgacagactacttttggatctgcctctggttcaaccagggccgcctcgtgctgcccgcgaccggggacgcgttgggcgtccggagcctgctcgccgagctcggcggccacatcatgagggtgcgtctgagcattctgtcgatcacacaggcctgctcagctgacgcgcttgatctcgtctgcgccgcaggacgcctttccgtctgcctgggcgttcaaggtctacctcggcctgatggcctacgagctcgtcctcgccctgatcctgcccggcaagacgcagaagggtgcgcacgggtcggcatctggtcgctcagatggagcacgagctgaccttgcttcattctcccgtccttaggcctcccggttcccagcctcggctacaagcagctcacttaccactgcaacggtgcgcagccgggcctcggcgcgttcgccaaccgaggctgcacccgctgacctacttcctccttgcctgctagccctcgcgtgctggtatgtaacgcttgcgacctcggcaacgctccacgtcactggcctctttgaccttgcctcggtcatcgacaactttggcccgctgatgtcggtcgccatcatcgtaggcttctccgtctcgaccatcgtcttcatcggctcgaaggccttccactggggtggcaagccgctccggctgtcgggctcgcttccttatgacttcttcatgggctgtgcgtccagatggcgcccgcttttgcgctcgccgacctttctgctgacacgtcgtgtcgtcctctagcgtcgctcaacccccgcatcggctcggtcgacctcaagatgtggcaggaggtccggatcccttgggttctcctcttccacattgctgtcagcgcggccatcaagcaattccgcgtctacggctacctctcgcccgtgcgtcctctgggcgctttgaccgacccctggcaaccccggctgaccgaccaactcgctgcagaacatggccttcatggtgctcgccaccggcctctacatcaatgcctgcgccaagggcgaggagtgcatccccgtcagcatcgacatgatctacgagaaggacggcttcatgcttacgttctggtgcgcagcggcttctcttgcgagctctagcaatagggagagaagactgaccaccttggctttgcaggaactttgccggcgtccccttcacctacgcctactcaatcatctaccttcaccggaccaacccggccgtctacgccttttcgtggccggctacggttggcctttactcgctcctgctcacgtcctactggatctttgacacggccaactcgcagaaggccatcttccgactcgaggatgccgggggctacgtcccgcgcaaggccttccctcagctgccctggcggcgggtcgacaacccgacctttatcgagacggcccacggctccaagctgctgacctctggctggtacaagttctgcgtgaagccgcacgtgcgtcgcagtttctcgctcccttgcacttgtgctgctactgactcgcgctgctgtcggttccgccagtaccttgccgactttgtccagagcttctcctggggcctctgcaccggtgcgtccgaatgtgcttcactagcgaggccaagcagccgtcgactgacgtcgctcctcttcactcctgcaggcttttcgacgccgatcgcctacttctacccgatgtggttcatcacgtgagtgcgaagttcgacaaggcccttttcaaatccttgctgacccctctctgccacctccctgcagcgtcctcatccaccgctgcgggcgcgactttgagaagtgcgaggagaagtatggcgaggactggaagcggtacctcaaggtcgtcaagtacaaggtgcgtccgctcaactggttccctcccaaatcgatgctgacgacagctcccaccgcagttcatccctggcgtctactgaggagatctaccggcggagctgtgcccaagggcactagagtgatcgtgatgtcatgcagctcaaaggaaatcagaagcgcgcttccgacccctgccggccgtctcaacgccgccgccgctctcgaccgacgcagccggcgttggcgttggcttctcgacccactcctccttagcctcctcctcgcgccgtttgcgttcccgctcgcgccgctccttccgctcggcctccttgcgttcgcggtcgaacgccgtctcctcctccccctcgccgtcctcgtcggcgaacgagaggacggccgcccgcttcttctccttcttcgtcttctccttcttgggcttgtcacccggggttgaggcggcggcgaccttgaaggtcggccggaagaaggtcgggtcgagcgaagccgagagggcagagggcggtggcggtggtggcgggccgaccatgtcctcgtcgggttcgtcgtcgccggcggcaggaggggcagcggccgatgctggagcaggatccgctgccagcgagggtttaatcgccgctgcagtattggcgacgggcgcggcctcggcttcaccgtccgagtcttcgtcgtccgaggcaaagattgcgcgaaagatgtccatcggcggcttctcatagtcgaggattgggtcggtccccttttcgcgcggcgccccctcgatcgccttgcgctcgtctgccgtcggctggccgggcgtgtactctgagccgacgtgcttaaacttggtctgccaggcgttggggtcgaccggtgctgctgaagcagcagcctctgcggccggtcctgcaaacgctccggcgtcgtccttgccctgcggcccgtccggatgcggcgccttgacgccgacccgcttggcgagcaacttgaccgggtagaagttcttgacctcgcgtgtcaacgcgccgtacatgcccatccgggctgcctgctggagcggcgtctcgttctcgggcacgcggtcgcgcgagagctgggcaagccgctcctcctcggcgagtcgacgtgactcagccagcgctgctcgggcggcgtcgtccatgacaaacaggccggccttgatcgggccctcgccaccctcgaagatgggcgcccgggccgtcgtgaaacggttggccatcatcgccgagagcggggtcgagagcaccggcttgggcggtgggggaggcggcgacggctccctgtgctggaagggcgcgtagctcgactgtggcagaggcggcggtggtgggggtggagggggctcgacgtactcgcccagtgttgcggcgcgctgtaaacagtcgcgagatgtcagttcccatgctggcaagaggacgcttgctcacaggcactcgacgtaccttgtcggcgctcatcgcctgcctccttcgccacgcctcctcgcccgtctcggctcgctccggctctcccgccttggccttgccgacgtcgtccggcgtctggtcccacttcttcgcgcgctcccagatcttgcttggccgaggccgccagccgtcggggaccgctggcggcgcaaaccactggtcctcgatgagtggcttgggatcgagtgcaaagccgggtaggagaggccggccgtcggaccaggtcgtgacaagcggaaacgagggctgagcggcggaagggcccatgcgagttgtctttgcggcggaagaggaagcaggtcgtggcaagggagtcgagaacaggcccgggagcctgtcgcgagaaggcagtcgctgtcagtcgtgcaactcttcggtcagcccgagcaaacagggacgcactcgtcgtcgaagtacgatgccttctctttgcccttgcccttgtcggcggtccgagtgctcgaggcaaagccctcgtcctcgtcgccgccctccttcgtccgcaggctctggctctcacggagcgcctcgaggtcctcgtcgtccataaagtcctcggctcgctggaccttgctcgcccgggcatcgcgcgacgagacgaacgtcgacggcttccagccctcggccgagcctacagagttgaagtagccggccgagaagccgccggtgaaggcgccgtggaagcgtcgccggccctgctcgtccgtcacctgcgaggaggagggaacgacgcgcaaggcaccatcagcgctttgactcatcgcataggtcacaggctgaggttttagccgcacctgctgctgccagacgggcacaaactcattcttgtcgcgcttcttgtcgagcgagggcaggggcgtgccgatctgagacgaaaccgggagccggagaaggtcgcgcaggtcagcctcgcaaggcaccgtctgacccgaccgttcaacgcacctggcagaagctctcgagcgggttcgacgccggtgcgaggtcggtctcgagcttgcgcttcaggcgggcggtcgccatggccgatgggcggtcgtactgggcgagattgtcgaatcgccgtggtggtcaagcgggaggaggtcgagccctcgcgtccctgacctctgacgaccaggacgactcgcctcaagcagcccgactgaacctctcgatcacgaaagctgatcaggacgggcaagcatgttgctatccgcgatctcctgaccatgctggccgcacctgagtggtagcgctttgcgtataccggctcgtcgacctcaccgccagctgccgcagctcggccgacagaccaccggcacgagcatcgcctacgtcactcagcccacgctgtctctcgggcacgacgcgttgtcggtcgctcgctaggaagctcgccagaagcggtctttgtcgacagagcttccgcaacttggcactcggtatggtactggccccgctgaagtcttgccttggctgtcgcgggacgccgccctgcgcctgctcctcttgctcccgccgtcaggcagggcggacgacgcctagccctcgatgggccggcaggcggtgtcctgcggccgaccatgacctccgcggcgtcccttcgtcgtcgttgctcgtcgccccacttccggaggtcggtcgtttgcctcgggaccccgcagacgctgacgctcggcgcctgctagcccgtcttgcctacaagaaggccgaggtaaggctacgaaagggccgctcttcccttgatcacaaccttcttcgagatgcccgccctctctgccttcgcgaacgccacgatgaacgcgtccatggctgcgtcgcccctgctcaacgcgacgtcgatggccggctgctcgctcgaccagacgcaggcgcccggcgatctgacgacatgtggcaacgcaaccctcttcaacaccttccggcccaaggcccgcttcatctcgccggagggctggatgaacgacccaatgaccgtcttccagcgcgccgacggctcgatccacgccggctaccagtcgcatccgcaggtacggcccgcgtcgtctgctcttcgacgaccgcgcctcgctgatctcgcctcgctctttcgttcgcagcatatcaactggggcaacatcagccagggcgccgcccactcgaccgacatgaccttctggactgactttgggccgatagaggacgatgtgccgcaagactacctgacgctggggccaagcaccatctacgaccaccgcggcgtcttcgacggctccatcatcaagggcggctatgaagggcacgacaccctgctctacacgtcgaccagcgcgattgggccgctcggcgcgaccgtcgacgagattgagggagtcgagaggcaggcgctcgcctacacgaccaacggcggcgactcctggattaagctcgactacggcgccggcgggaaccccgtcatctacgactggcccgagtcgaacctaaccggcttccgagacccgtacgtcttccagtcgcccgagatgctcaagctgctcggcaactcgagccagggcgcgaccggctcgcatctgacgaccatctcgggcggcgtgcacggagaagggccaaagctctggctctaccgccagacggaagagggcgacgtcacccgctggacgtacctcggaccggtcgtctcggagcccgtcaactcgagctggagcgcttggtcgggcaacgtcggcaacaacttcgagacggccttcacctgccgcctgaacgccgagggcgaggcgtcggacgacggctcggacccgtcggcgatcaccttcttcggttacggaagtgaaaatggccgcgtcgaccaccagaagcactggggcctgtgggccgccgtcaacatttcggcgagcatcggcagcgtcgtcgccgagaccaagtttgccggcgtcgccgactggggcgcggcctacgcgtttgtgacgacgccgatcaccggcaaccggtcggtcatggtcggctggacgtacgaggacgatgcagcattcgctttgggcaaggcgatgggctaccaaggcgtgcgtcgttcgatctcttccccttgtccttgacgtcagctggctgaccccctcatcccctgctgcaggcttttactctcttccgcgacctgagcgtgctccaaatcgagaacgtcgaccccaacacgcccggtatcaaggacaaggcctcctggatggtcagtaactcgaccggcggcggcgagggcgtcacaatcacgaccctcggccagcgcgtcattcctgagacgcttgaggcttacaagtcggcgtcaaacgtctcaaacccggaggacacgacggtcgtcgccggctacacgccgtttgccgtccagccgaccggccggtactatgccatcgccgcctcgttcgagtttgaccgcaactcgaccgcaaaagccggtgtacgcctccttgccagcgacgacgagcacaccgacatctactacagcctcgcgaccgaggagctcacggtcgtccgcgaaaagtcgtcgctcatcacccactgtgcgtgggcggctctcggtctgagccgccgacctcgtgtgctaactgccctcctccctaccgcagtcaacaacgccaccgaggtcggaaagctgaaggtctggcctcaggtcggcgcgacgacggtccagctcaacctgaccatcatcgtcgataactcggtcatcgagatctttgccaacgacgagtttgcgctgacgacccgggcgtacgttgcctctgccgtctcccggcgactgactgccgtcctgacccctcatcctctcgatctgcagctacccctggctggaacattcggtcggcgctggtctgctcgccagcaccaacggctcctcggccgacctcggcgtcaaggcaagcggcctcgagctctgggacggcctcatcaatgcctggccggcccgggccgagaacacgagccgtggcctggtctgggacggtccgacggcctcgctctttggcctctggaccgggggaggggagagggtcagtcgccgcgggcgaagtcgagcatccgagcacacagtgagaggcgacccacaagtgaacgtccttgccggtcagcttgcggtaggtcgacgagaaggtctcgagcttgtactcgagcaggttcgagtccttggcgtcaaggaagaccttggtaaccttggagccgtcggtgttgacgcgcgtgcgcttgccggtgatctccgaggggtagacgaggtccgagagaatcgactcgtggacggccgtcagggtgcgcgaacgcgggcgcttctgctggttgcgcgagttcttcgacggaggggggagcatgcggcgctgtgcgaggaagacgaagtggcggtcgaacttcttctcgagctcgcgggtgaggctgaggagagaggcaaaggaaaagaggtcagcaacgcggtgcttggagtgacaacgcggactgcccgacccagacccctccccttgtgacctgtcccctcaaggcgacctcgtcccgaccaccttgacggctcgactggcctggcgaagacagtccggccaccccgagcgacaggacgggcaagccagtcctgccgccgagcagaagggctgacgctagccggccgtgctcgggccagaggtcggaaggggcggcacgcaaagagggcccggcctcggcgtaggtccgccggccgagccctcgcggcaccctgcccatctgccccctcgctgatcctgctgccctactactgcccccctcccccttcccttctgtagcggtacgggcgccgagccgagtggcgcgtgagggccaggacgaaccgctgctggatcttgtggaaggccttgagctgcgggacggggacgaagatgatgatggccttcttgccgcccttgacgtcgacctcgcgggcagccgagatctggaggacgcggagctccgacttgagctcgggaacgttgttctcgaggtcgaggatggcctgagcaacggtctgctcagtctcgtcgggcggcgtgaggggcgcgttggccgtgcgctggatcttggactggaacgaggacatcttgaggcgaaagatgggctagctgctgttgcggcaggcgggcggtgcagaggggtgcacggaggaggagcaggagcagtagcagggagaatcgaccgagagggggcggcaggtcgggtcgggcacgaagagcgcgaggtccagcaggagcacgcgcgcagggagcacgagcaagggtcagaggtcggggagagcgacagggggacaggacgaagaccgttcgaaagcgggaaaagaggggcagacgtcagtgacggctctcctggtacgtctggacgtctatgccgacctgatcgtgcgtgaagaagggtcgtacctggactggctgggctggctggtcttctctcgggaggcgcaacagctgggccgtcagccggagcgcgcgcggggcgcgggggctggctgtgggaacctcgagcaataaccccgatggctcggcctcgcgcagcggctgaccctgaacaacagcccccaactttggacgagccgatttcacgcgccgcgcgatgccagagccctgtgcgcgtcgacgcttgcagctgcccagcgagacgtgtaagcaagccttctggccatgaaaccgaccgccagtccaagtccgcactgaagtcatcgatcgctgactagactttcggtggtgacacgctcggaccaaggtccagctttgaccgtgcccgagaatgtcatcttaactagccagcgcgacctgcctgcctacctttttcgacactcaacgagcgatcctccatctggcatggtgcgcacggaaagtagcggggggtgaggctgagacacatcagaagcgcggcttgtattacaggtctgcctcaaaaccgaagggcagggacctcccatttgcgctgaccgacgacgccctctccttctccaagccttggcttgcggactgcccgctccacggtttgaggctagggatcgtcgacgatggtgacctattgaagtcgcagcaagtcgtactggctctcttcccatgaagtcgacgccgcctgccacgccgcgcccgggcaccgacgagcgactaaccaggaatcgcctttccccgtagtgaatcgaaggcagcaacgcatgtgcgccagagtgcagaatctcccgactcggactgacaactccaatgtagcttaacggcgaaccgactgcgatttgcttgtcgcgcagcctcccggccgagccaatgcagcgacgaactgccagcagcggcgaccgcgtctttcaactgtccggcggtgggccctcgctccgctgcgccgaccgtagccctcgtctgtaccgagggctgcaggccacgtcgctttcacttgactcaccatgagaacccctgcccaattcatctaccgcagtgccagtgcccgtctctcgtcgcggcgtcgcctcttcgcacgacgcacggagatgcccgcagccgacgctgcaccctttcggtttgaagagcctcaaccgaacgcggccggccctgctcacaagcatcgcccaagatgtccgacggccgccttcccgcgtcgggcgttgcttccagcctcgcagcggaacggtgactccaatcgcgggcggccgaatgagggcccttcaacgagcgtgcttaatgaaacatcgacgtcggccgccactgaggacaacgagcggtttttcgagtgactcttcctgtgccgactgtgtcttcctggcgttcctttgggtgtcgtctgtcgacgggcgcggcctgacgggcgaggcctctcgtcgaagcaatcgcccaacctctctctgcgatggtgatgcccctcttctcctgcagcaagcgtgggggcaccgagtgtcagggatcgcagcgacgagacgagccacatagcgagtgcacccggcgccatgcgtacctgccccatcgactcgcgcctgctcatttatgtccggtcgcgtcgcgtcggaggcaagtcggagagacgacgacgcgtcgacctcagcctcggcccagcctcatcctctctccatcagccttgcccgacctcttcttcaagcagcggctccctagtgcacagcttccttgcgctctccactcttctcccgttggcctcggacactatagccatggcgccccatcagccggcgccgtcgtcggtgctcgcgctgccggtgcacacccccggcctgacgcggctcgccttctcccccgacggacagtcagtcgctgctgctccgagctcaccttgtcggttggccgccgcctgagcttgacctgacacctgtcttgtcacctcagattcatctttaccggtggagccgacacgctcgtccgcgtcttcaagacggctcagggcgccgaggccgagccgagcgtgctccaggagcacaccgaggagatcaccttcctcgactgctcggtgcgtccagcaagctcctcggattgagctcaggaggctcgctaagctgacctcagctttcgtttcgcctcgtagagcactgcgcttgtcacgtcgtgcgccgacgcggtcttccggagcttcgccctcccaagcgcgcacgacctccatggccaggtcaccttcgccggcaacctgacacgcgccgcgggcatgcctgtccgctgcggtatcgtcgacagctcgggcctgcgcgttgcttgctgtgccgagtaagtaggctcggaccgagaatcgcgagtcggggtgcgcaacgagcccggctgacacctcgtgctctcctccaaactgccccactgcagcgatgggacaatcaagatcgtcatgtcgtcgctctcaacgatcaggaatccgctctcactgccgcactctgtcggctcgtcgtccatgggccactcgtcgtccgcgcgctcgctggccttctcgccagatgggctcgtcctcctgacggccggctgcgacggcaacctgctctgctgggacgtctcgcgttgcgtcgtcaacagcgacagcggcaactttgacgaagacgacgacgagggctgggaagtcccgaccgtcgccaaggcattcgagggcgtctacaagaagagccagcccgaggacctgctcgcgacccagcccgtctggcactcgtcgggcaagtacttcgtcgtcccgaccaaagcgcatgaaatcctcgtcatccagcgcgacggctggaagaagctcggtacattctcaaacggcggccacgactcggtgcatccctggttaaatcgaggggctcgcaggtgcgcaagcttgagtgctgacgttcgtccaaaccctcgactcatgcaggctattgccgagctcgccttctcgtcaaacggaaagtacctcgcctcgtctggcgtcgacggcaaggttctcgtctgggaggtctcgtccaagtcggccattgcttcttaccagacggccgaggcctcgcccatcacctcgctcgccttctcgcccaagtcgaatctgctcgcattcgccgactcgaagggcaccttcacgcgctggtctaacccagtaccttcgtcgtacctgcacccggccgagagcgggcctggatcggcagcggccgcgccgacgaaacgccgcggccggtcgccgctctttggcgacgacgagctcgacgtcgaggacgaggcactcgacccacgcgcgccgcgggcaaacagcgactcgcccgtcaagccccggcgaccaaagcggggagacgatgacgacgacgccggcgatgacacggcaatgggcccagtcgacggcgaggacgacgaggacgaaggtgacgagtacggagacgactggatcatcgacgacgacggcgagcatgccaaggccaaggccgaggagaggggccaggctgggcttggtcggtcaaacggcatgggcgcccgcgagctcgtccgggtcgccgtcagccaggcggccttccagcctggttcgaccagctggaagagcaagaagcggtatctcagtgggtctgatcgttctcgcttttttttctctcacgcgcccttctcactgacatactcctgcagccttcaacatggtcggctcgatcgacgcgactgacatggagacgcaccacgtcgtcaatgtcgacttccatgacacgtcgcggcaccgcggcttccactttgccgaccacagcaagtattcgatggcggcacttggcgacaagggcgcggcctttgcgtcggagcccgactcggtcaacccgacctcgaccgtgcactaccggccgttcgacacgttttcgtcgtcgtcctcggccgagtggaccgtcaacctgccgccgcgtgagaaggcgcttgctgtcgccgtcggtggctctgacgagtcgatcggcgccgtcatcctcgcgaccgaccggggctacctccgcttctttaccggcagcggcgtccagacctacctttggaatctcggcgagaacgtcgtcagcatggtcgccggcgagtcggaggtcgctgtcgtctaccgctcgggctcgacgacgatggacggtgcgtccttaatctccgtccggcgctcgagtgtgaactgcactgacccagcctaaatgtcgactcgcccctttctcaggcgcccagaacctgcgcttcctcctcatcaacctgctctcctttgacctgatccaggaaggacctgttccgctcctccacaacgtcacgctccgctggctcggcttctcggacgtcggtgagcttcacatggtcgactcgcgcggcatcctttcggtcctcgaccgcttccgtcgccctggccagggccgctgggtgcctgcgcttgatacgaacctgctcgcgcgcaagcagggcaaggacgagtcgtactggccggtcggcgtcgtcgacgagcactacatggccgtcattgtcaaggtccgttggagaagttgtcctgcgtccgccctcactcacaacattgcctgatgtcgtacccatgctacttctccagggccagaacgagggtccgggcttcccgcgcccgctcgtctctgaactcgacatcaacttgccgctgctcaacatggacaacgtccagggccagctcgaggagtcatgcgtccggcagaacttgacggtcgccagcctccgggaccggcagatcgccgccaactcgaccgcgtacgagctcgagatctcgcaggccgagctcgccgtcgacaaggcgcttctccagctgatccagacggcgtgcaaggccgacaagctcgcgcgcgccctcgacctcgccacgctgcttgcctcgaccaaatcgatcgagagcgccgcccagattgccaacttttaccacctgcccggtctcaaggagaagatttctgcccttcgcgccgtcaaggaagacgagctcgacgacagggacgatgccgaccggcggcgacgcgagaatggcgcccgctggggcaccggcaacgccggccggtacgtgccgcaggggaccgaatatgactacgtgaccggcaacgcccacctgccgccccggaccgagctctacgcccgggcagctgtccccgactttgcaccccgaccggtcggcggtcgcaaggcgttcaaccggccgtccgcggcgacttactcgcccgcgcccccgtcggcgccgtcctcgcgcttcacgctcaactcggaggtcgtcgaggctgccgacgactcttacggggcctactcgccccctccggccggcgacgagaacgacgacgacgacgggatggacctcgaaattcaagacctcgacgaggacgagcagcgggcggcgaacgccaagcgccggcgtgaggccgacgagtcgtttggcgaaccggccgaccggcgcaagcgggcgtcggtgggcggcgagtcgtcgttggactcggcgtcggcctcgaaagctcgtgagttgcccagcagaactatcgtccctttgcctcgctcgcagagagtgctgaccaggcccctccaacctcgacccgccagccccgaagaacccctttgccaagaaggacgccaacacggtcgcgaccagtgcgtcctctccgctttctccctcttccaagccgttcccgctgacagtctatctcttgcgcagacccctttgcgcggtccaacctcggcaagcccgtcactgttgcaaagtcgacgtcgttctttgaccgcgtcgacgagaaccgggacgagccggtccgcagtgcgtttcctcccgcagctctcgcctccttttctcgagcaacaagctgacgaccgatcgcccctctgccacagacggcaagaaaggcaaagcagccgccgccgccgccgccggccccgctggctggtcaggccccaagcagacgaccctctttggcctcccgccccgcgctgctgctgcggccggcgctgggcccgcaaaaaagcgtcccggccggccaccgggcaagacgagcaagcagacggccaagctgtcagcctcagaggcggtcgctgcttctctcgcggcgatggctgctgacggcggcggcggcgagtcggacgacgacgagggcgcgggcagcaggaggacggcagggtttcggccagacgtcgacgagttcgagatggaggatgtcccggagcccgaggcgggtgacgacgacgcgccgatggaggcgatcgaggacgaggtcgagacgcagcggacacaggtcgcagacaacgacgacgacgacggaccggccggcgtatgtccccccgccgttcagccttaccccctttgagcagcttcattaatcctctcccctttgcccgcaaccagacgcccgaacgcgcaacgagctggtcgccctcgccctcgccgcagaagaaggcgcccgctccgcctctgacgtcgcgcgagaagctggccgccttcaagatgcgtgcgcaggctgccgaggccgaggccgaggccgaggtcgaggctgaagagcacgaggccgaggacgacgacgcttgagtgctctcgcgccagacccttcttcgctagcttctccctttctccgtaacgacccccgccgctcctctccctcctctgatgcccgcgagccttcgctcgctccgcttgtacctcatgaccacctcgcaggttcgcacccgtcccaaaagcaagcaagcgacaaagagagcgacaaggatgagatatcactctccaatgaaatcgacgcgcgtgtgtgcgcgcgagcgtgagctcagccgctgccgtcgaaccgctcataggccttcttgaaggcgctcgcgtcgcgcttctcctcggcctcgccgcctgggccaacgcaggctttccagtcgagccggttgggcgtgccgaggaggttggcgaggacggacctgcgagggcgggggggtgcgcaggctcgacatgtcgccccagccggccctcgccccgctcttccacaagacggaccgccagcgcgcgaccgttgccgaccttgccgcgcgcttcgttgccgagaccgagcgcgagctcgcggccgagtcggcggcctccgaggagggcgaggtggaggtggagaagaccaacgaggattggtcgtcggcgaaggtggacggagtcgtcgtggagagggcggggagcggcgcggatgagaaggataagacgacgccgcctccgccaccgtcagcgcaggccgaggccgagggtgagccaaagctatagattgcggtctcttcttctcgcgcgttgctctgtcgttggtctgaggggtcaggtgagaagctcatcgagagcatgattccatcgccgtctgcgcaagtggctttccgccgtcctgaccccttcagatggtaggaccctcgacaggttgcagcaaagagtcgcatggccatggcatgtcgtccgtcgacgagcggctacttgtcgtcccactccccgcgccagacgttgccgagctcgtcgacgagcgtgagacctgccgcccgcagctcgggcatgagagctccgacgtccgcgagccggcggtggtcacgtcggaggaaggaaagatggccgtcggagcggacgtcgcgtgtcagcggtccgtatgggctcgaccggaggacgatcgtgcgcaaggccggcaggcgattgggatccgcgagaaatatgtcgaggagctgcctgagcttgtaccggggcagactagtcgtgctggcacagacgcaggctaggccgatcgaccgcagctcgacgagctgccaaagcggctgcgtctctaactccacgagcggaccggtggtaataagtcggcggagcttcggaagcgaagacaggagtgcagagagaacccgcccgcgatcggagaagtacgtcgaaatgctgaggatttctaaatgatcgaagcggccgacgaccttgaccaggcttgagatcctttcaggaggagcgcattcaagcgacgagctgacgatcgaaagggtgtgcagctggaccaggaccgtccaaaggagagtgatgacgctctctagaacgctatcgatgattcccggatgctcgggtagcagagagatgtcgagctgccgaagcaaggcaaggttaagccacgagacgagccgctggacccgtggcatctcgaactgcgtagccggccggagtaagatgccgagtgagagcggagccggccgcgcaaagccaggcgctgcgactgctaggagctcatgccagtggaggcccttgacgtgcttgagcttgtgcaggcgcgccatgacctcgagcgcggccctgacgcggagcgtctcgttcttgaagtcgaccgtcgtgacgagccggttcgtggcggccggccgcttcgagatggccgtccagaggcggcgcttcttgagctcgacgtcgtactcgagcaccttgaagaggaaggggagagtttcggactagcaatagataaggtcagctcgagctggccgagacgacagggggattggtggcgagcagctcactgcccaagccttcgagactagccgcaatacggctagcgcagccggcgggtcggaagtgaggtagcggatcgactcgacaaagtgggcgagtacttcgagctggagctcgagcggcaacttgggcgcctgcttatgacgctgcggaggggtcaaggtgcgaaggcgccggcggcgggtcaggaaagtgacctttcatagaaggcttgcggtgggagaagcacgcggaagcttgcgcgtgacatggtcctctctggtctggtgctcagacttcagctgcgaggtagaaggctgggtgtaagggctggcaggggcggtgatggttggggagaagggagagacgaccagcctcgcccggccccctttctggcggcccctttcgcgcgaaagcgtgcgcgaggctccctcgaccatcagctttcgagccagtcaggcttcaatggtcatgctcatggcgggagacctccgcccgacgtcactgagatctcgccctctggcattcggtcctcgattgagctggcctgcagatgagcctcgtggactccctgccggcgcgagttgtcgagccgcttcaaccggttggcctcggtccgtcgggccagctcctccgtcttcaggcttttgagtcgggccttctccttgagagcggacgctcgccgctgcgcgacctcctcgggcgagacgccgagcgcctcagcctcggcgaggatcttcttgctgaaggacggcgagcttgggtcgaagagaggacgcgctccctttttgcggtcggtgggtatcggccggctttgagacgaccacagcatgtggtcttccggatggcgatcgaacacaacgcccgttgccgtcttgtgcgggatcgatcgtgccggaagctggacgccggccgatttcgaatttggctggctgtattgctgcttggccaattgcttggcttcctcccatccctcccatcgtcggtgcttctccgccctcagtgcctgattggcttcctcccgttgccggtgctccttccccctcagtgccttacgctggaacttctccttgagcgcaagctccctttgccggatgaagtcttccggcgagatgccgagctgttcagcctcggcgagggccttcttgcccaagacgggagctacgccggtgagaggttggcgctgctcggacccgctgggtgtcctctggtgtgactgcacgggagaggaagagtcgggtgttctgatcagccgggagattgcggccggaaaagagggcgccgtacagagtgcacgctctgcaggcagctccctcgacggaaagctggtaagttgacgcacgtcggtcccggagccgatcgcagggtagcgcttccgacgacgggtgtcgaggtcttgcagcgcgccctgaatcaggccagtcagatgagacaacggcagtagcttgaccatcggattcgggtcgatggagaaaacccagtctgcagcggacgacacgccgcgtcagcgagagggagtcggcgcgcggtaaggggccaaagggagcaacgcacgctgccaccgattctgcgctctggccgcctgaccaccgtgagcgacaaagtcgcgcttgatggcctcccgcaaagcgcactttacttttcccctgacggcgaagcggacggcagcgacctggtgcgttgccttgatgctcgtccggacaaagacgccgaccgaaacgacgggttcggagcccggctcgacgcccggtctgacggcagttggtagcgacttgcgctggacggcgagcccagggtcgaccttttctatcgtcctgcgcaagtagagctcgccgagctcggcgacccttgagcagctctgagcggcgagcagctctcgaaagcgcgcgacgtaggctggactcgactcgtgccgccggcggtcgctcacagcgagcgcatccgagtccagcggttgcggcgctccgttctcgagtttcggaactgcctggatcctgagcagcggccgctcaagcgtctggagggccggcgtggtcggcaagaaggccagcggcaggccaggatgcagcgagctgtccatcggaggcgcgggcacggtcacagagatcatccccttgcgctggtcctgcgcgccgtggtgcgtcgtcaggtggactgtgagcggataccggggccgagatgccagcggcttgcgcaggacctgcaacggtcgtcgccctcggaaccacgcaggtccattgccggcgagtgctgccggtggccatggacgacgagggtagatgggctcctgaacctccttgggatcgtcccagtcttcggcaaggaaggcctgaggaaaagaggaaatcgagatcgcgagtcagcccttgcccttcgtacgaagcgaaacgagccgtaatggcaactcactcggacgtcgggcacgccccgcttgcctctgatctcgaactcgcgccgactgacggccgaggcacccatcttgttgaggtggcggcgcgtgcccgaccgggcccgggtctcctgctgcttctcgaactgcttctgagcgagaaactttggcaggagccgatcaaagtcggtgatgccgcgcagccggctatacccctgagagagccggacgacgtcctctgagctgtagatgacctcgcgctggccatcagaagaggatgggaacgacgccctgatgaggcgcggcacgtgctgtgtgcttccgttgacgacgacgaccgcgagctttcttgagctagggctggcctccgtcctctcctctgacctccttcggacgacctgccagccgctgtgacccgcagaactgagcggcggccttggaacgagctggcctcgtgccgccagcgaccggagtccgacgagcctggccatgcagcgcggacaggagagctgctcctggactgctggctcgaggaggggcgtaggaagctcaaagttcgagcaaggcggcaaggttgacgttggtggcgacgaccggtttcggctcggcgacgctcctactttctcccgctcgacgtcgacctcacccacactcgccctctctccgtctcagcattccggcagcttgcacgagaccccagccaggcttcatgtcagatcaggcccggctcgcgcagatctcacggctcaaggccaagcaggctatccggagcaaggccctcgcccagacccggcggtcagcgagccctccctctggagcagccgccgggccgagcgtgcccaagtcgtcgcggaatgctgcagcggcgaccgatgccctgccggcgctcgagcgcgatccaaggctcggccagtactttgagtatgacctgagcaagatggtcaactcgcgcggcggcttcctcgtcgacgacaacgagggcctcggcgagcaggccgccatcgagaagcgccggcaggaagagcgcgagaaggccatcaacggcaaggtcggggcctgggagcccggtgagtgtccttgctccagactgctgtgcgactcctagtcagtgctgacggccacgaaccttggctgcagccatcgacccggacaagggcccgcgctgccgcgagtgtcggacgcttgagattgaccagcgctggctcgacacgttccacatcgcgctctgctccaactgcaagaaggccaacccggacaagtactcgctcctgacaaagtccgagtgccgggacgactacctgctcacgaacggtgcgtccccctgggtctgcgcttggtggacgacagctgctgacccctgctgcgcgcgctcccgtcgcagacgaactcaaggacgagtcgatcctgccgcacctcctccggccgaatccgcacggtgggaccttcagcaacatgatgctttatctccgggtgcaggccgaagagtttgcctacaagaagtggggctcggagcagggcctcgacgacgagtttgaccggcgcgagtgcggctcccttcaggcgcttttgacaatggaggttgacggctgaccctgccttgtgcccttccaggaaggaaaagtcggagaagaagcgcaagaaattccagaaggggctggccgagtgcggctttttgtgctgcggtcgtcgctttcacgggtcgctcgctgactcgcccttcactcaagccttcgcgcccggacaaagcacaacccgtaccagaacaggctcgatgccgagcatgtccacgttttctcacaccccgaggtcctcgccgacggccgctctgtcaaggcctgcgctgagtgcggctttgagatcgagatcgagctcatctgagccgccgcacacgccccctcggcgttgtagccttagccaaccctacttcatgttgtcttacttagtgaccggccggcgaaaggattcttggtcatggataggtcgtcagaagagagtcgttcgagtgaagccggcgctcagcactcagccttggaaagtgcgcgcgtcgcgatcgtcgctgacgagccgcgcccattcgagcgccaagcggtagacactgcgagcggcaaacaagatttagtcaaagccgacgcgcaactgcaggcgaggtgggacgcactaggtctccatgtcgatcttgcggccaatcgtctgcttccacttgcgaccctcgctcgcaatcttgcggagctcgcggtcgtcgtacggactggctgggtggctggcattgacggcagccgacatggcaggcgtcgggccggagaagtaggcgtggacgttaaacagctcgcggtacgagctcgaaatcgggataaaatggaccctgcgagaccgaacgaagatgggtcagcgcccggctgaagcgaggctggcatgcaatcactgaccagggctggatccagtcggagaagaactcccggtagacggttgtcttgagaacagcgctctcgctcttgagcagcgcaaaaaagcgggccgagtagcccatgccgtcaatgtcgatcaggtacttgtgccgccaggcctcgccaagcgggactgccggagcgaaacggtgatcggcccgaaggccgtcgcagccgccagggtactgcgtgcagccgaccgccttggtgaaggcgacgtccatcatgtcgtcgttgagcgagtgcaatggtagcggggcctcgacatagtccttggcgcccggtggccgaaagacgactgacttgttgctcaccgaccggtccgacgtcatacggacgaggctgcgtaatcgggatagagatcagcgcctgtgctcctcgagggcgcgagctgcacgcaccgatgccgctggtagcgcgagagaaagccgggcggggttgagccgccgccggtcgtcgcgccgcgccagaagacgcgatcagtcttgagctcccagctgacctccatgtcgtcaacgtcgtggatgcgcatgtgagccgggtcccagccgtacgtgtagcgctttgtcgaagaaaagtaatagtggcttggtatcaggatgtcgctgaagccggcggccttggcgggcgaaaacattgggtagagggcgccgatcgtccgccagtcggagaaaaagtggccctggtcgtagtgcgcccacgggtggtcgcaaaagttaaagcggtcgtcgagatcgtcgggaaaggcaaagtcgtcggacgtgccggcagaaacgacgccggcggccgcaagccagttgtacggcgcctggtcctcacccagctgcgaccggagcgaggagaagagccgccgggcctgggtcgtcggcttgcaggtccggcggaaagcttcccagaccgagccgccgtcgccgtgccagtcggggataaagtcgccgccaagaacgcccttgatgccttctgcccgagagcgaaggagcttgctcgctcagcgacgtgcggcaacgggggcagacgtctcaaagacgtactggacgcgctgaccgtcaggttggcgaaccgcttctgctcccatggcacgaggatccggccctcagccttctcgttgatcggaaaatccatgtcgggcagcttgtctgcaagatgggaaagggagaggtcgtcagcgcctctttccctgtcgccctgctgaccaacccaccctgaaacttctcgagcatgaccctaaagcccttggcccgggcgccgacctcggcgtcgtcaaagccactattgacgtcgatggtgcgagtcttgccgtcctcgacgcggacgaggtcgaccgacgggaggaggccgacgtcgagcgaccgccggcgaatctcggcgcctgtcagtagccagaacggccggagatcggccatgagctggtcgtactcgtcgatgatgacggcgccgtttgccgttgcaaagcgataccagtcgtcgaagcccaagggcggcggtcggccgtagcgccgcttatactcggcgacagccttcgccagcgagcgtgactggccggcgaccagcttgctaaacttggcctcggccgccttgatcttgcctgggatcgggtggataattttcggcggctcgtgctgaccgagcgacgagtagagccggctgaggtaggtcgatggcgaggtcgagcgtgtggccgagagccggtggccgctcgtgcgatcggacgacgagaggaccgtcagtagcgcgagcacgcacgtcacgcaggccaagacgaggtagagcggccgggcctggcacagagctgcagagagcagcttgatcttggacttgagagtaggacctgccgccggcatctgaggcggcagacgaggagagcgcgagctgggagagagaaagggggtcctcgaaccccgcttgctgacccccccccttgcggcgaccaacaggctacatacccggcggcgaagcgctggaggccgtcggtgagattgcgcgtgcgatacgggccgagcgggaggcgtcggcgacggcgggcgaggcggcgggtcgggggaagggagaggcgcttgtgtatgtgcttgaccgtgagtccctggagctggctttgcttgttgggctcgagcggcgcggcgcgagacgggcgtgaggtctccggcgtggcgaaggaccgatgagggactggcgagggccagaatggcccaagcacgcccgcccgaccacccgcctttcctgacctccgcctgcgccgagccagaccgagacaggaccaccgctgagggacgtaccgctcagcagtcttccagccttcagcagcccgtttgcgcgaaggccggcaaagatcgcccggaggtcggcggccgtcgtccgtgtgccggcggtgtgaccgtaacctggcgtgcgagagggaaggagggggagggtgttagcgttggcgttggcgagggagtgtgcgccagttaggacggtcggtcggttggacggcggccttgcttccggcctgccacgaacgagctcgacgccggcccgtcacctccatcccacctaaccttgccgccaacgccgccaccgccagaaggaagagcagagaaccgaccggtatggtttgaaaactggaccgtgttgacgacgtcgacgtcccagccgagcaactggagggggaacgtcgctgctttgttacctgcgcagcggacggtccggggttggcacgatcagggacggtgtcaaagaaggaggagtcagctcgttggacttgcgcgacgcttttccatcgcggcgtatgctgcccggtcttgaagagtaagagagagaaagtcgactgctagctggaacaggccgtagagaccgcgagcagcctctcctccctccgaccctgccttgcagccgccccctccccggacgcaagagactgaccgacatagcccgatacaacatggctctggattgacagcacccggcgcggctcgacggcacccgtcgggacgggctcgagatgctcgggggaattgaccgaaagggttgggacggacattggaggggagatgctggtggttgggcgcgaaggaggaggagcacgacgacttgcctccctgaccacgatcccccccctcaacgcctcttctcgctcggcagcatggcgctcgtcgactacggctctgattccggctctggatccgaggacgaggctccggccccggccccggctccggtcgccgtcgcaccccgtgcaatgatgccgcctcctcctcctccgtcatcagcagcagcaggctcgtcctcctcgagcagcgttccctcgcgcaagcggccgctgtcgccctcgccgccgcccgagccgcagatgacggcttcggggatcgtcctaccgccgccaaagtcgtcgttccgacgcaaggcgctcaaaaagttcacgatggaggacgccgtcaagcccgtcaaggcggcgttgaccgaggaagacggcccgccgccggccaaggagcgcaagctgacggcctcgagctcgggctcggccctcctctcgatgctgccggccccaaagcagcaggcgccaaaggccaagccgctccctgcgcccgtccggctcaagccgctcgagctcgacgccgagggccggatcgagtcgtttgactcgacgccagaggaagaggccgagccggaggcgatggacttctcgcgcaagcccggatcgggggaatcgttgacggcggacgacaagccgatgagcatcgtcaggccgctgtcactcgctgcaaagggcaagggcaaggctgttgttggccgggagccagagctcgactttttcggcctcggcgcttccggctcgtcgtcctcgtctgctgccctccactcgtccaagccctcagcaggggcgacgacgatctcggctgcgcccgtcgtcgcgccctttcgaccgccgtcgccgacgcccgacgacgcctatccaggatactacctccacccgcggacgaaagattggcacgcgtacgagccagcctactaccaggcgtaccatgcgcgctggcaggcggcggccgacagcgagagtgcaggcggaagggcgttcgacggcgtccgggacgggagggaggagattgttgacgtttcggcaaaggcggcggcggatgtcgctgcgctgccgcctgtccgaccagggacgaaggccggtgtcgaggtgcgcccccctccctccttcctgcttaagcgcgagtgtcattcaaaagactgaccattgcttcttctctcgccctcgctcgcagccgccgaagcccaagatcatccagagcaaggccggccggcacaaccagctctcggccctcatcaacaatgcaaaggcgaatcgcgaggcgatcgaggagcagattgccaaggccaagcgcaacaaggtgcgtccccctccccttctctttgccctgctaccgaggtaagatggcggagggctaacgacgggcccgactctttcgtttgcagcgcgcggccggacagagctacggcttccgttgatgcgcccggcctgacgaccgtgccgcgttatcggaggctctttgcaacagggcggttctctctccgacggtctcgcggctggacgatcgtctcgactcagcccttgccgttcgcagtcttgccttcgttcgacctgcttgtgccggcaatcgcccgggcgctcgcttgaacgaagccgcccttttggtagacggccgcctctcttccttctgccatgaaatgcgccccttctgcgctcggtacctatctgctgccagcccgctcttcggcgagcgtcgaccccttcgggcttcgggacccagaggagcgggaagacgggcggctcggcacggcgcgcaatgacgacgcgcccgagcagacgggttgcagccgcagagcagggctgggcggaggatccgtaattgaggccgacacttcagctgaggtgaggcggctgcgcaaagtacttttctcgatcgcccggccccgagcaggcgggtcgagacttggtgcgggctctgctggcctgctacgacccaccttgacaccttcacaccttctccctctccctccctctctcgactcaggctttgcttctcggatcgatacccaccaacccacactcacgcccaccaagcacctagagcccgatcctagtccaaggtccgacctgccccttctcgatccatcggtggtcgccaccgtccctgcgcgccacgagcatgtctgacccgatccttcgtcccttgctgcagaccctcggcctcaccaccctcttccaggaccgcatcggccgacactcttcgtctgccagcacctccttcctccccttcccacctttctccttcctctcatgtcggacgctcagcagcagcagcgcccgacgccgtcccagacgccggcatcgacgacgcctgcggccggcagcaactcctcctccttggcccacccgcacccgacctcgtcgctcttgccctcgctcggcagcagcagtgcgacgatcgacgtcaccgaagagttctccaacgagcagatcgacgccttcctctcggccaacccagactttgccgcaagggcgctcgacgaggccgccaggggcggcggcggcgcggcctccgccggctgggacgcgggagctcaggtgcgcacccttcccccccctcgctccgtccatccactgctccctcccatcaaaagagcgagatcggcgggtagtggcatgtaggcccgaagcagcgctcgcgacccgtgccgttcgatctcgctcgggtggcctgaaggcttgccgatctcgctcttcgcgccccacctcggccttttcgcccgctcgcccgaagctcgccttcgaccgtccctctccaccagccgacctcatgacttcagccgccgagcactcttgctcacatcgaccctcttacctttgccttccaggacgcatcgatggacggccgcgcaaggtccggccaccttgactcgcagcggatggcgagtggcgccggcggaggctggacgagcggcagctaccccgcaggctcacagtacagcatgttcgtaccgactgcttctcattctccttgctggcttccgatccctgaccctgcccttctcgtcgactgataggaacgacccgtcgaccttttcgccgccaaattcgctctcgccggaagggaagatgctgccctcaccacccgagggctcgacgattcacgccgacgaccgctcgctctcccccttcagctcaatgatggcccaggctggcgtcccgcccgtgccgacactgccgacggcctcgccgcagccgtttgccgcgccgggcgtcgacgtcttgacgcctccgccgtcgagcgtttcgtcgggcgggtcgacctcgagcggtgagcaccgccaccaccaccagcacaagcagcagccgccgatcaagcggactatcatggagcgccggctcgacaagcagcgctcggcccagtcggctccgtcggaaaagacgatcccgcaggtcggacggccagtgaccggcctctactcgtcgagcggctttgacgtcttgggcgccctcagccgggtcgtcagtcggccgaatccgcgcgtcaacctcggaccggtcgacttttcgtgctcgttccttgtcgtcgacgtccgcaaggcggactgcccgatcgtctactcgagcccgaccttcagcgtcctgactggctacgaaaacaaggaaatccttggcaagaactgccgcttcctccagggccccgacggccaggtcgcccagggctcgcgccgaaagtacacggacaatgtcgccgtctcacacctcaagcgcaacctctcgcaaggccgcgagtgccaggcctcgctcatcaactaccgcaaggacggctcgccgttcatcaatctcgtcaccgtcgtcccgatcccgtgggacaccgaggagattgcctttcacgttggcttccaggtcgacctcgtcgagtcgcccaacgccatccttaagaacatcacggacggcacgtatcaggtcaactaccaggtgctcgccaacgcccagaacccgctcgcgcccgcggcggctgatgctcggacgagcggcaagaaccggacgttcgggcccgagttgaccgagattgtccgactcagcggccgcaaggaggcgcgcgaggcagtcgagtgcctcgagcgggctcaggccgagggcgaggacgaggttgacgacgacgcgcccgagctcaaggatctcgagcgcgacctcatgatggagtggtacaagagtctcgccgagcactctgacggtacgtccgccttcgcgtgcccccgtcatcgcacgttcactgacatggcccgtctccattcgcccagacttcatccacgtcctctcgctcaagggccagttccaatacgtctcgccttcggtccggcgcgtactcgactatgagcccgaggacctcatgaacaagtacatctcggatatttgccacccgtccgacgttgtgcccataatgcgcgagctcaaggattcaacccaggccccgccgccgggccaggcggccaagacggtcaactttctctgccgggtcgagcgcaagacgggcgggaccgtctggctcgagtgcacaggccggctctacattgagcccggcaagggtcgcaaggccgtcatcctctctggccgcgagcgcgtcatgcccaagcttgagtggtcggcgatcggcgcgatgggcggcatcggcggcggcacgatggagggctggggcatgatgtcgttcgagggcctcgttctctacgccaacggcgagctcaaggacatctttggcgcgtcggcgaccgacggcctcctcggcgagtcgctgctcgactatattctgccctcggagggcagcgcttcgcgtgcgactggcgccggctcggggacgaccgtctcgcccgcgatcctcaacacgccgttccaggagccgattcatcagcggatgctcgacgcccttaagctcgcgagccgcggccagccggcccagtcgggcgtgacgatccggcatcagatcgtcgtcccatgcggcgcgctttcatctggcggctcgtcgggctcgtcgtcgtcgaaaggccggctgccgatcgtccaagaggttgcgacgaccatctatgccatccagcgcgactcgcgcgagtaccttgacctcgcctcgggcacgtcgcccgcccggcagcagcagcagcagcagagcgcgcgctcgcccttcggatccgaggataccgagtcgttcccgctcgaggccggcaccgggccctcgcagaacaagcttcggcagacgacactcgttttccaggtcaagctgctctctgcccggccccaggcggccggccagcccccgcggccgacgaaccacacgtcgttccagacggcgcacgagccgacggccgacgtcttcgaggcgctcgacacgggccggagtacaggatggacgtacgagctccaccagctcaagatcgagaaccggaagctcaaggagaagatcgcgggcaagcgggccggcagagcaacgaccgacggcgacgacgctgcaaagagcaggcggacgagcggccaggccgccaagcggaagcgcgatgttgcgagcagcacgcccgccgcaagccgctcgacgccggcggccaacggctcgacgagccagtcgcctgcagcggcggcgatggcgcctccgcttctccccgtccagcagcagcctcagcagcacccgtcgctcgtcgctcagcaacagtcgtatgcccaaagctgggccgatccctacggctcgcctggcgactacagcagcgcaggccagcagcagcagtactcgacggcccctcccggccagacgagctactacagctcgccgccgagcgacggccagggccagtaccttccgcagatggcctatcagccaccgccacacgcgatgtcgtatggcggctacgacacgtactgagtggcctgcctccctctcttcaaaaagcgctactcgcttgcttgtctctctcgctctcccgccgccccttttctgctttcgcctccctgttgccgcgctcctcgatccctgccgctcggtctctctcccgttgtactcctaccccgatatgcggcctccctctcttcgtctgcccgcccgcttccccttctgtatccatccccaatccgtcctcagcgtccggtcgtaaacacgactcacccaccccctttacaaacccgatcggatgcccagactgcccccgctccttattgctaaccttccagtgtgcgacgatcggtggaggagggaggaacatgcaagggcgattgggccggcaggtgaaggcatggcagcggacggtcaagggccgggcaggttacataaaaacgtcgggcgctctgccgtcgtacgtcgacaaggcgatgccgacggccgcaaggtcgttgaagagcgcgagaaagaccatgcctggcggtcggcggttggcgatccagtggggtcgggctgagaagctgcccgtgactggactggaggaggtaagggaaggggggggggaaaggccgaccgacaagttgtcgttctccgccggagttgaagcgtcatcgaagccgtttcgtcaagcagaccagcaggcgggcggctcagaaggcccgggtcaacgagtgagttgaacgcttgacaacctgcgtcgaccggcggcgctcgtgcgtgcgtgctagtgctcaatccatgcctagacgcccggcacagacacgttcgcctctggaccggtcaggcgagcagcggagcgtccgacagaaccggagctggcgaggttggcatcgttgtcatcgttggcgagcgcaagagtgagggcgaaagcaaaggcgagtgcgcagagtcggcgagtgtgggtcggacgcggtccggctcggcttgagagggcgacggcgacggcgctgctgctgctgctgctgacgacccgtctggaaggtcgggttcatcgaccgccgccaaaggagagaaagtaccggtcggccgtccatcgacttcgccgtcgtcgtcctcggcgtcgagctcgataacctcagcctcagcagtctcccgccctgcgccgcccgccctgtgcttcttgaacgccggcagccgtcctccccgctcgccgtcgtcaccgccgccttcttcctcgtcgtcatcgtcgaggacggatgggggtgatgacggcttggccagtgcatacgggaagagctgctgctgctgttgttgctgctgctgctgaggttgttgatggaattgatgctgttgcgagtgagcatggccgtgtggcaagccgccgacctcctcccttgcgtactgcgaccagtccatcaaggcccacgttgtcgtcgaggtcgtaggaggaccaccaccgggtggaaggtcatactgcaactgctgctggatggggtacgcctggccacctgcggtgtgctgctgttgcgagcccgagggcccggcctgctgctgctggtagccctgctgataatcagaggccggccgggcgtaggcggcgtaggtgccgtcgtcgaggccgtagaccgggccattggcggccgcattcgaaaaggtcggatgatatgggctgtttgcggcgatctgggaagaggggtccatcaatgggtaggaagaggaggaggcggaagagccaggctggtcggcctgcggttgacaagcggacgaagcgagcgagcgccagtgaagacagggcgaggtagcgatcaagggcaaggatagggtcaaacggaagtaaaggtcagtgacaaggcgatgagggtggaagcaaaggtcgaggagggacgcacgcggccccattcggcgtaggactcagtcattcggagggacgggacgagagagacgcgagagctcggcggccgctgctgctgctagagctcggcgaggtgcgcgagaaggcgagggtgtcggtcgatgtccgtttcgagcgggcgtttgacgcagaatgacgcagacgggcgagcggaagagcaggcgacgagcagagaaaggtctgtgtgaaggaagagaagtagtcggagagcgaagaagaagggcatgggctgctgatcggaacgccaccctgctctggtcgccgtcgcctcggatgcaagccggcgcgcgggcagcaaagagggcctcggccgagatcgagaccggcacgatgctgccagacggaggttccgcccttcccatcggcgattgagccggaggaggtcagcgagagctcaggacgggcagcgttcgaggggtcaaggtgagtcgtcgaggagaagaagaagagagcggagaagggtctggcgcagatccctgtcgagcatcgtcgcgaagggtcggcgggcgagcagacgactgtagcggaccggctggcgacgcctagtgccacgagcggccgacggaccggcagctcatcgtcctcacctacctaccacatggtcgtcgaggtgccgtcgaggcatgcttggtctactgctgttgctgatccttccccgacggcctgacccttcttctctcctctgctgcgctgctgcgcatcttctcacgcgggcgggcctgggcctccgccgtctgctagcggctgctgctgctgctgcctcctcgacgacatcgacacctctccgcccgacctcttttgcctttctctctcccgcgcatgcacgcccgcgcagcctcttcgcccgtcggcttcccaccgccgccgcaagggccatcgtcgccaggcatcagcacgagctcgctcggccgacgcgttcgctcgctcgccggcgccggccagggctcgggcccgctgacgagcctgcttgggcccaacgtcagcgcttggacgcgcagggtgtgagtctagctccttcttggcggcaggctgggtggatgaggagagtgtaggagatgatgaagggttcaaggtcgaggtcacgtccgccgccagtcgtactagagctagctcgaccgacgaccctgcttccttcgggccagcagctctcgcaaccgaccgaacgactgactgccaggactgactgcttcgtgcctaatccatcgtctctctccagcttccgcaagccagccgtcgttctctcatccctcctcggctcgctcatactcctcttcctcctctcgagctcgagctcgttgcgttcgcctccggccctgcctccgctcgcctacccagccgcctcaggcccttacgtcgcgagcgcgcggcatccggcctcgccaggcggcgacgacccagagggcggcaccctctgccacccctaccacgcgttcggccacctgacggtggaacccgacatccccgagctcaaccgctaccatccgttcgcagatggctgcgagagcccgcagctgatgcgtggcctgcggcatgcgaacggcgtaggcgacagcgaggcgtacgtcaagcatgcgagggccgacaaggggacggcttggcgcatcggcaacggagggaggccgaaggcggagaacgtgagctggctcaggggaaggacggcgctcctcatcggagacagtaccgcgaggaatcaggtcagtctttggcgtggcagcgctgtgcgaggaggcttgctgaagagctgaccatgctctctgctctctccgctagctggaacaattctgtgccgtgagtcgttccgaactctcgagcttcccgccgtcgtccaaaagtactgacggcccttctcgacccgcctgacgcctcccttagttcatcggcgagcagttcacgatccatcctccggcagaagatgcgtcgcgggaggccagcggccggcagacagtgaagcgggccggcaaggatgcggcctacacgcatgcctgctatgctaagaagctcgattttctgctcgtctcggtcttccattttggcgtcgacaccgaggagttctggtgcgctcctcctgtacgcggaggcctctgagggcgcgttgcaattgcaccgcctcgcggctgacgcatcaccttgcctttcgatcacaggaaggacaaggactcgttcaacccgccctcgacctttgaggaccgcctcgagcagctgtttgtcccgctcgcgacggacggcgggcttgagcgcctattggccgagcagcctgcgccgggcacgcccaagcggtcgatcgacctgattgagctttcgacgggacttgtacgtccgacaagtccctgccacaaggtgcatcctcttgcaaggctgatgcgggtcgaatatcctctctgcagtgggacctggctcgctttgctaagcgcgacatcgacgctggccagtcaacgatcaccgaccttccgcgcaaggagctcctctggttctcgggccggatcgccgagatgatcggcgcaaccgtctctgccttcccgcgggccaaggtcgtctggcggagcatgcactggccgagcgataaggatgcgaaggtcgattggttcctcggctggaactatggcgacgagacgaagcataggccgttctttcatcacaaccggatcctccagcttggtgtgtcgcggcatcgaccgacccctgtacgcggccccggcgctggctgaccaaatttctattctatttgtcgtcgttccagagcaagctgcacgggccgccatctcgccagacagctcgggcggaggcttcccctcagtcgaggtctccgagtgggggtcgatgctcctcggccagcacgtccaccagatgtgtgtcctctccgcctttccacctcttcagtgcggcgccggcttgtgcagtgatgcttgcggtgggcaggctcaatccagacgttgtcgctgactcctccgctctcgccccttccgacctgacagggaccagctgcacccgggtccgctgccggcaggctatctcggaggcgacatcctcttgtatggtgcgtcccaggtcgtcactcctctgtcgttgactggctgattcccattctcggcgctcgtcgacttatcttgcagagcttcgggaagccgtcttgtcgcgaggccagccccagtccgtctgaaatatattcgtccggccactctcacttgcatcaagacgtcggaagcgcaacttcatcgtagggtcggccgtggcggtcagcagtctgaaatgcatgcaagccgtcccttgcctagcctaactcgctgtcggatgccaagacgccaggtgtgactggacttgtcgaggggcggcaagaggagccctgcgagtctcgactcgccccgtatcgtgaaggcaagtcagactcctgttcactaccccgcaagccacaacgagttctagtcaaggaggagaaacgccgactgtctcgagggagaaaaaaaagggttgcggcagaagcggcaagagcgtcggcttgcgcaaggccgttgctgcctgaccgaggggaggcattcgccaggcatgcaagagcggtcagtcgacaagcagcagcaggcaggaggacgactgccgccagactcttgttgcggggacccgtttgtcgaaccccccgccgacggccgctgccgaccgactctgctgcaccgcggcgcgacttgccggcggcgtgcgcgggtcgaaagaccgacgacgagctcgaccctccgacgtccatttcacccacccctttactcttcccaaaagatgctcgctcgaggatcgtccaaggctgctgcctcgtacgtgtttcgccctttggcttaagacaagaggaggacgctcggctgaagagccgccagtcgtccctccgacaagggctcagggctgaactccttccttctctgcctgctccttctgctctcgctccccgctcgtcgttgtcgtctcgtcccatctcgccggcatctttcagggccctcggccggcggtcgatggccaaggtgcccaagcccaatctcgtcaattcgcgcgagaagaactacgtcgccatcaagtgagtgacctctcccccagcggctttgcgtgccggcggctcggccctgtcgtcttctgccatccttcttcatctgtgctgcacggccactcacagcgactcatactgacgacgtctcctcaccttttgtcaactcgcaggacgtctcttcgtggcgatgccctcctcaacacgcctcgcctcaacaaggtctgtccctcgtcggcccttctctccgtgcggagaagccagagcacgcgtgcggagaagccgggtgtggggttctgcgacgagacgaccatcgcacacaaagctgacccttggctctctcgtcttgtctgcagggtgcagccttcactcgggaggagcgctcgatctttggcctcgagggcatgctcccttacgaggtgcgttcgtctcggtcattctggcagcgtcagctcgtctgccggtgtgcacctgtcgttggcatgactcgtggcggcctcaatctcgatctctgtcactgaccttctttgacgacttgctgcgctgtctgcgcaaccctcaggtccacgaccttgagctccaggtcaagcgggcctacgcccagcttcagaagcagccgaccgtcatcctcaagcagtgcgtctcctctcttttccttcactcaccggctcgcgttggaccctagactctggccttgcatagcagagcgcctcgccgagagcgggctgctctaccgacatccatgctgatcgtctgtgaccgcgccctcttcgctgcgtagcgccttcctggcgtcgatgcgagaccagaaccaggtccttttctatcggctcatgtcggaccacctgaaggagctcctcggtgtgctttacacgcccggcgcggccgaggtgcgtcgctacctgatcgctcgtcttcgaggctctcgcccgctgactcgcttcgtctcgcgattgaacgtcaggctgttgccaactactcgcacctgttccgccggccgaccggatgctacatctcgttcccgaacgccgacggcatgcgggcccagctcgagtcgcatctctacgcaaacaacgctcaggccgacttgagcgaggctgtcccttcgccgaagaagggcgtcaacgcggccgaggaggacgccgtcccggacgcgccgatcgacctcattgtcgtcaccgactccgaggtgcgcaggcagccctaacacacttcggtgctcctgccgttccaggctgacaatctatcctcacattcccaggccatcctcggcatcggcgaccagggctgcggtggcatcaccatctcgacctcgaaggcggcgctctacacactcggcgcgggcatcaacccgaaccggatcctgcccgtcgtcctcgacgtcggcaccgataaccacgcccttttctcagacccgctctacctcggctggaagcggacgcgcgtacgcggcaagctctacgacagcttcatcgacaagtttatcaacaactgcaagcagctcttcccggacgcgctcatccactttgaggactttggcctcgccaacgcccagcggcttctcgacaagtacgccgacgacatcccttgcttcaacgacgacatccagggcaccggcgccgtcacgctctcggccctcatggccgccgtcggcatcaccaagtcgaccctctcggaccagcggatcgtcgtctacggcgccggctcggccggcatgggcatcgcccgccagatccgcgacggtatggtcctgatcgacggcctgaccgtcgacgaggccaaccggcgcttctggtgtgtcgaccggaacggtctgctcgtcgagtcggttagtccccgttgtccctctttggacgaatgctgtttcttggtcgacgggctgacagtcttgcgcgactcaatgtgacgtctccctcagatgggcaactcgctccggcactcgcagctccagtacgcacggcccgacagcgaggtcgccgactggccgcgggccaacccagacaacgatgcccttcgcctgctcgatgtcatccgccaggtccagccgacggtccttatcggcacctcgacccactcgcgctcgttcagcgaggagattgtccgcgagatggcaagccatgtcgagcggcccatcatcttccccatgagcaacccgacttcgctcgctgaggtcgaccctggtgcgtcgcgaccatccttaagccgtctgcgcccaaccaatcgagccacctgctgacttttctttcgccttctcatcacacagcggacgccttcgagtggaccgagggtcgcgctttgcttgcgaccggctcgccgtttcctccttgccactacaagggcaagcagtacgtcgtcgcccagaccaacgtgcgtagcctttcctcatcaatgttgcgccggagcgaacggctgatgcctctctcgtcaaccttttagaacgccctcatctaccctgctctcggcctcggcgccatcgtctccaagtcgcggacgctctcgcccggcatgttcgctgccggcgtccaggcgctcgcgtcgctttcgcccgcgctcaaggacccggaggcctcgctcctgcctgacctgtccgaagtccgggacgtctcgctccacgtcgctgctgccgttgctaagcgctcggtcgaggagggccactcgcgcgtgcccgccctcgccggcatgagcatggagcagattgaagagcgcatcaagtcgtcgacctggtgcgtgctaactagcgacctgcccttttcgagaattcctcactgaccttctccctctcgtctgctctcagggaccccgtctaccggccgctcgagctcgtcgacctcgagtagacttcgttatctcctgcgcaaacatctgtagaccccgcatctttgctagacccatctctatggctttctcgacctaatctcgctgcaagaagggtcgtcggaaccgttcgcccgacgagggcccgaccctttcgtttttctctgccgagcccttcttttcggcgcgagccgccgccgccgccgcctcagcccgtctcgcagcagtcaggacggctcgattgactaccaccacatccctcatcatgcctgcccctcttacccaccccgctgtcgtcggtcagtcactgcatcggctcttactgcttgtccgagctcgtctctgacgctcgctcgctctccagacggatggttccgcgagatctcgtcgcagtggcctggtccgttctcctgcctctctcgctcacctagccgcccgggcacgtcctgactcgcactccaatatgatcctgactttgctcacctccaggccaggccatgactctcaagtgcgttcaagctgcagcctcagtcgtgtgggcgccgaccgcctgccatgcagtccatcgactgatcgtcgcctctttctgttcttccgcctgccgccggccagggtcaagcagatcctgcacaccgagaagtcgctcttccaggacgtcctcgtctttgagtccgagacgtacggcaacgtcctcatcctcgacggcgtcatccaggcgaccgagcgggacgagtaagcggctttgtcttccagcttcgcaggcaaggcaaattatatgcacatgcccaaaaccttcagctcttgacaagagtcgaccggtcagagctgaaagttgtcaccctgtcaagagacacctgactcagtaatctcgcaaccgcatgggaactcgattgcaatgtaaccacagcaacatctcgaccggcctcgtcttcctgtttggcaggcaggacactcgagcgcgcatttcgtaatattttgattcaagcaagagtggattgatcagagcagaagattgtcagcgcggtcaatcaaaacaaccctgactcggggatcagctcagaaccttcacatctgttgcattcagaaatgaaatcggcctcgaccgcgtcggcactctgtctttcagtcacggcgaccaaggttgagattcagccgaaaaaaaaggctagcacgctgcatcggcggcgacgactggacgagcagacggcgcctgtcacggtgcctggctggcaggcggcggttgagcagcctcttgggcaggaggaggtgagacttgaggccgcccgatggaggctggagtgcgcgggacgggctgcgctgggtcgctcacccggacaaatcaacagcgtcagcgcatgcgcccatttgagcgagtaggcgagcagcagacgtacaaggcggtccggcaggctggcaagccggagctttagatgccgccggaggatgatcacccccttttttgcttggtccagtaagagctgtgcgtgcacctgaacggagcggaaaggctgaaggggtggggaacgatgcgaatcgttgggtccttgccggttctgggtttgatggtgctttctatcgtgatacatcggggcagccgatacacttgacggtgtgccttactgtcaccgccctttcggcgaaggtcggaatgtcgttttgagttcaagtcgacgccgtgctttatgacgacgacgaaacgacgaggtgaagaaggcgagataaagaaaaaaaggaagaaaaaagaggacagatccagctgcagagttcgtggaaaaggaaaaaacgagcgcgacgtgaagagccgcacttgcctgtcaacacatgtgccgagtaattttaatcacgtcccaattcctccgccgcgtagcttgatccgggccgggcctccgaccagctcgacgataatgtctgattcacacacgacctgcttgccagccaccgtggcgagcaagatgtggacgcgccggccctggtgataggcgttgctgtggttcttcagggaggcctaaggaatgaggatgccggggtcgactgcgaatgagttggccgcggatacgcagatcgagtctgtcatacgagaagggttttgaggggttagtcgttggaacgggcgtgaaaaggtgatgatcataccagtatggtaccaatatggccgtactaatctggtaccagtaggcataccaatgccacatcagaacacatactggtactacaccaggagggtactggtgtcgtaccatcagttatcctaccaatactacatcagtatatggcacgggtacatgtgccaagagagatactgttatgtaccggctcagcggccgtataaggcgaggccatggaggtcgctgacgactgccagcgacatgcgagagtttcagaagctccacgtagtgcagtgcccaccttctcaccctcgtcggactcattgtcgcttccgtccgggtcgtagtcggggtcgtggtccgttgtgtcgttcggccagagctcctttccttcctcctcgccgtcggcatcgccttcctcctcattctcattgacgccgagctagtcgttggttactgttgttgcctttagcctcatctggaggcggaggcggagacgcatgctgaggctgcggggcctacccctggcgggctccctggcggctctcgttgccgtcgaagtggccgtcagttaagtgctgctttgctggctcgggctggaccgtccctcggtcgacgtcttgctggctggctctcagagcgtggtagcgaccacgaggtctacattccgcccgctcccttgagtcttcttctccagcctcccttctctacttgtccgccggcctcggcctctgtgggcaggatcaggagtcgcatatctcttgtgagcgcagtggttgtccggtttcgactccgtttcggtccgttggaacgttgacagcgctggaccgcgcacaggggacaatagaaacacctccgactcggagccgacacggaggatctggccgatgatgacggctaagaagcagtcgtcagatcggcaaagctactgaggcccagccggcccaagtcaagcccgctcggtccaagaagtcactggcggccaacggcctccaaacggttgggggcggtctggcggcgctctgctcgacgctggggccttccataaaaaaacgctgtcgtcgaggtgcataaggacgccactcgaattaccatgagcctcgagaagaatcgtctctcgccaaacgccttccagactttcgccaaaaagcttccagccgacaatcagctcgcgactgcctgtctattacacctagtaatttacggcagctgcgatcatcagcgtcggtgcctgctcgacctcgagcttttgagctcgacttctggcgtctgtcccattttggtctgttttgcctttcctctcatcctctcttgcttatcctctcatcctctcgattcatatcctctcgatgcttattctctcgaaggcttgagctgacatgcatcaaaccgcctccattgttaggcggctgcatgatcgtattacatgcatttcaacagccgctcctggtcttttgcacgtacgtgttggcggctccaccatttttttcaagacgcgtctcttgaaccgccattgcccttccgatacaactagagtccacggagctcatcttcatggccagccagtagctggcctcaattcaaaaagacgactggatctcatgacgtggcgcgcgggtgtgctggatcatatcgagtttgtgatggaccgatgatcttctagagtaatcgagcttctgggctcagcaggcggtttaagccctcctgcacgcgaccgcctcagcaacgaccaaccctacatccacatcattccgcaccggacccattgtgcccttgcgcctttcctcccgtgcaggagcgggaggcagcaatcccagccgcccacgggccccgccgatcgagcaccagcaaagtcggccgctcagaacgctcgaggaaaacagccgcacgacggccagaacgccaccgccggctttggcctctccccggtgccatctcgagaggtccctagatctaatcgcacatcagcaacatacgttcagactggtcaggaatatcagcaacacacgtttagactagtcagggtgtcattggcgtgctgataccttttttctgctcgatgtaccttcgtacggcttgattttgacaacggcggaggcggcggcagcggaaacgtgctggagggtgccgtcatgccggagttctcgcacgccgttgtgccggccgccctcagggacaacggcctctacgttccctttgacgaccggtgcgtcgtttgtttgctgcttccttgactaacacccctgcaaaccaactaccaccgcgaccaacaggctcgccgacgagcccgctttgaacaaaactcatgacggcgactcgcaggggcaagtataaggtaggaaatcgtcatgaccgtcgtacgaacccttctcctgacatcccagcccatgatgctccatttaaacctctttaaatatttcaaaagggcgctacggacccgaaggtggccctcaacctctcgggtcgggtctagagccgagcagtcgccgtaatcgataataacctgctcgtgattgacgacggcctacagttgagctgtcgtcttgtgtaagagatcagcctaagctccagtcccctcgcggctttctctcttcaggcaaagcagatgcactgacagtttataatttcctgtgcgtgtgatgcgacattggaagcttggtcggctgatcggacagcctgaccaacacgacgttcaccacgccgaccgctttcctgaagcctccctccctgtgtgtagacgcgcatgatgtcctccttacaacccgcggccggccgtacgatggcgtcccccttccgcctcttctcagagcctctgtcactctgttaagatacatgtacactgacttttctcctatcccgacgttgcggagaatgtcaatgtgggaagagttcctgccgaagcggtagaggaaggcggcgagctgctgacagagggggatttgcggtttcctaccgacaccaaaactggattgtcctccaggtagctcagacggaccggaagaagctgacaaaccatttcttctgggcgcgggcgtggctcagcagcagccgcatcgtgccggccgacttctcgagcgtgtaaggaaggaggcctcctggatttccagctcggaaaagcttgatttggcttgcacaccacccacgcaagatggctacttcatgacctacacttctgttcagcgaaaacgcgtacaagaatggaccagaagcggcatgcggtctccacctcagcaacattgcaactgtgcagtgcaccactcactacctacaaccatatctttcgaatcagccttcgattgttgtcgatcaagccaccacctgcttctttgaggcacagtaacaaccaatctgcttttttaaggtggtgacgcaaaacagagatttgccggtcctgatgcgtgtgtttgccggcccgcttcggtttcgtttggttttttgcaaacctgcacatataggtagggcgtgttttgcccgtaaaggcgtgttttgctcgtaatctgacctgtaaacatttgacgttggttggttgtaacagcaaagtggtctcccaatgaatgcacatgatcaacccggtgtagacaaccgggaactgactttgctgtctgttgtgagaaaagccattgaaggcctccttgctctgcttacaaccccggcgcacgacagattgagattcagccagcaagcagacatatcgtcccaatcaactttgattggtaacctctaccaatgacgctgctgttgctctcttgttctggaggatagaggggtagagagtgtgagtgagcaagtaagcgtatggttacgctcgggatcgagcaaaatgatgtccttatgacagccccaaaaggtctacaatgtggaagtatgcgtttcctgcaaacggagactgattggggggaaggggggcgttggccagggttattttgaggtatgctttcagcatcgcaacatgcctgcataaaataaatgtcggctggcatgtattttagccagtgcgtgactatccggcagcgtgtcaagcaaggcccgcttgtttccagtcgaattacttgccttttggccaagcacgtaagcagaatgacgcgctgcatcattgatgtgaacctagtttcattcgcaattaccggcctcggaagcacatcgttgattaagtttgggctcatcaaactacattacccgactcagcacctataagcacctatttatctgtttctgatctccaacatgcggtcatgtggagcaagtggcaagctggtctctgtcccaggtcaccgatcagctgcctcccggtgatttcaggcaagactaggcaattatgagcgctagccaattgcaccagttaactcggtctccgacaggatgtaattatgacagaacgcactttgacaggcaataattgataaaaaaaaaagagggaaaaaatgccagagctacgtcccaatttagacgacaaaacaagaggaagtgggggttcctgagtcactcgctaagcgaagagggtgagggcttgggatgaaggcctagactagaggcagaggtaaaggaaaatgggcgctgcgacgcaaaggaatgacaactgcggtccgtttgcagaagatggaagagcgctctgagtttcagcttcaccaagatcaagaccacttgcttgagacttgaaatgcagaatatcccgcgatgaggtactggttcattgccatcgccgcacgctcccagcaggattgggccatcatcgctaacgccgcctcgtaaacttcaacaattgacgagcgagcagttctgtttgcatcatagggtagtgatcgactcggagttaccgcaaaactttcgtgaacgaatcactggtgatttcgtcccgtcgaacgaattcagtgcagagactgcagtgcggatgaaatgcgtcattgcgtgcttccgaggtaagagagcatacgggaatgatcggattatcattaggaaaatcagaccgtaagaaagcgcgggttagggttagggtgtaacggggcatgcgatgggagcagagggtcagaggcgctatagacggtggtacattggaggctagaaggagttcaagtggctaaggggcttcgcctaaaaggcgaagaagcgagcacgggcacggagcagagagagcgagaggaggcgagagaagagaccatagcggggcataaggccccgccagtgagcgaagagagcaacagtcgaaggagaaagagttccaccggtcgagatgacgatcgggtggaagggagacgacgtccggccgtcgtacttcgagcgcttttggttctcagttgaagtgagttggttgaggagagaaccagaggcgcaagcagtacgcggcgcagcgtcggcagacacaccagcaggcagcagcgacgacggaaggccggcaaggtcggcagaggcaatcggatcacggccagcaagggtcgccgcagacacgacggcaacgtcgtactcggagacaggaccgccgaacgagccagggccggtcacgcgcaagtccgtgcgctggtgagagcccgggacgaaaggctcgagcgcgacgcgagtgcgggggatggagccgagatggcgtgagagcaggcctttgacgtgctcgtgccgagcgacacgccagagcgggcgagccgagcaaacgtcgtcatggccgacgacgttgggcagcgagcaatgtgagcagtggtcgtcctggccggggcagagcgtgcggatcgacagatcgacaggccagcggcgacctcggccgacgtcagatgcaggttggcagcgaacgggatggccgacatccagcgccgggcgatgggcgaggcgttgtcgaggacgacagctcggtcagtcgagagcagggcggccaggagggactcgcgacgcttgacgaaggccgtctggcaccgggcccgctgcgacgtcggctggacgacttcgtcctcgacctcggcaagatcgtcggcatcggccagggtgaccttgagctgggcgtcggccgactcggccatggcagctcgagcgtggtgtgagacctcgacgtgcgagaggaggcccatgccgccgagccgagcgggcagagacacaagaccggcgtccgatacgaggcggcgaggcgacgaccggaggatgtgaaagcgctcgagcagggcctcgtcgagctggtcccaggcgccgggcaggtcgtccgtccgaagggagcgctgcagatgacggaggttgctcgccaagcagtgacgcaagacgaggagagcctcttggccgggcaggtcggaaagccgcgagagggccggcagctgggcctcgactttggaagcaaggaaggcggctcgaacatcaggagggccgacgcaggtgccgaggacctcgaggccgtcctgagcgacgatagcgagcggcgtctcgtgacacttgcgcaggttgagcgcaagcccgcacgcgggacgttcgtcgaagaaggtggcaaccgagtccagcgcgccgggctcctccgacaggatgtacacgtcgtcgaggtaggcgagcaaggcgtggcccgggccgaggtgccgttcgagagcggcgagggtgttgcgcgcgccgatcgagaagagcagagggccgagaggatcgccttggcggacgccttcgcttgaggtaaggacgaccggagcgtcgccgccgatggctgagacgacaagcggggtcgggacgtcgtacgcccagcggccggcgcggaacagggcgggcgcatgctggaggagacccttgccgagctcgactcgagacaacgagttgaaggcgttgctgaagtcgagcgaggtgacgtgtcggtacggggccggcaagtcaaagtcgatggcacgcccctccctacccccccccccctctcctgcagcaactcggtgtcatgaccaagggaacgatcatcgaggtcaacgtctcggagctcggtctcgtcaccgccggcggaaaggtcgtctggggaaagtttgcccagatcaccaacaaccccgagctcgacggctgcatcaactcggtcctcctcgtctagatctctgcgtcgctccccttcttctgcttttgccgactgggtcgactctctcgaccgacggcctcctcctcccctgtgcttgtacacccccatcgcctctcgtgcgcgctcctctcccagcattcttacatggtcttctcagtcgcttcctggccgcgtttgtcagcgtcaccttgatcctcacgagtcgagacggtgcgaggttagcgagttgtcgagcagtcagctacgctcgccggtccgggccgggccgacgacgtcagccgtgcttgctcgccgtcgagcactttgccttcgactctcaaccctttccttcttctcgaccgaccaaccacacgcacgcgcaagcagctgctacctttcccgatcaggccgctctccgagcctgacctcacgcgcccgtcgacgagccgacaaccctcagcctggccgcctccgcaacctcgcgacccgtcgatcgagatcgcttccgggcggacgcccttccttccgtttcgtctctcggccttcgctcgacacgcccatcgccttcccagccccttccctctagctctcagacgcggtttcgacctcaccccgcgctcctgatggaccgccctagtctgcccaagcaggccgaccggccgtcggacgaaggcttgatgacgctctcgcgcgggctcgacccggcacgcttagcttcgtcgtcgtcggcccctgcctcgccttcggctgcgtcgatggctcgggggagcagcgcagacggcttcatgctcgggcgggcagcgaattcggtcgagccgggtagcagtcaggacgcacgtcgctcgaacggagcggcgtcgacgacgatggctgaccggcaagactcgtcagcttcagccccagcgatgggtgctagccatgcttcttcgacggcgaacgcaacggccgctgccgctgttggctcgtcaccggtttcttcaagctaccagcggcggatgcctctctcgccgctgagtcggtcgctcatcgacgaccctagtgacgccgagggccgtgggacgacgttcgtccgcagcccgccgtcgagcacctctccctcgtcctcgacctcacctccgacgaccaaggcgcggcctggcccgaccgtcggtttcgcatctcatgaccggtcgtcgacgcgtgcgagccggccgatggcccttccagctccaccaccgccgccagcgagccagaatcgagcagcaggcggtcagacgccgctgaagagcccctgcttcgtccacggcaacctcggccactcggtcacgcttcaagattggctcgagcgtcggtcgcagacgacggcgagtgggtgtggcgccgtcaaggacgagtcggccgaggttctgcgcgctgcggccagcacagctggcggtgagccgactggggacaacgacgacgacggacagcggccgtcgcccagcggcaaggccaaaggcccggcggggacgatcgctgaggaggacgaggacggacgggatggcgcggctgccggcagcggctacgacacggatgggcccgagggcgagtcgctcactcgccagctggccgagacggccgtcggcgtgcgcgagatgtcgaagcagctcggtatgtcctggggcctcaatcttcgcattcttccacctccttctgcagggtcactgaccaagctcttatggacctcgctgcaggtcgaacgcgtgtccggtcgaatatccagagcatcctcatcatcacgaaagcgcgcgacaaccggctgattaagctcacgcgcgagctcgccatctttctcatgggtaaacctcgggccgggagcggcgagaaccgccggggtcacaccgtctacgtcgactgccagctgcgccactcgaagcgctttgatgcggcgggcatccaggccgagcgaccagagttctttgtcccgatcgtccggcgccggtcgtcctcgtcggcgagtgtcagcacgctcagtggcagcgtccacggcagctcggacggcagcggaaacggcaacagtggcgggggcgagggccagcttcgttactggacgagcgacatgtgcgcaaagagcccgcacctgtttgactttgtcgtcactgtgcgtccctcgtccctggccttcgcagccgctcaatctttccgactgacctcgtggtcgaccgtcttcagctcggcggcgacggcaccgtcctctttacttcatggctgttccagaagattgtcccgccggtcctacctttcgcgctcggctcgctcggcttcctcaccaactttgactttgccgactacgcctcggtcatgtcctcagcgatcgacagcggcatccgcgtcaaccttcgcatgcgcttcacctgcaccgtctatcgggcgatccggccagaggacaacgctaagggcctcaaggccgtccgcaaggtcggcggcgagatcctcatgagcgaagttggcaaggccggctgggaggcactcgagggcgcgagctcgaccgccgccgccgcttctgcaaaggacgcccgtgaggccaagcggagcgaaaaggagatcatgtgcttctcgacccggccggtcgagacgtttgaggtcctgaacgacctcgtcgtcgaccgcgggccaagcccctacgtcagcatgctcgagctgttcggtgcgtctacttctctgctggtctctctccctacaaatctgaccgaccctctgcctgctataggcgacgagcaccacatgacaaccgtccaggccgacggcctcaccatctcgaccccgaccggctcgaccgcctactcgctctcggccggcggctcgctcgtgcaccccgagatcccggcgattttgattacccccatctgcccgcacacgctctcgttccgaccgatgctcctgcccgacagcatggagcttcgcatttgcgtcccgtacaactcgcgcagcaccgcttgggcaagctttgacggccgtggccgcgtcgagctcaagcgtgcgttctcttcgactcccactccccacgtttggttactgatctgtgcgatctactcgattcaccagagggcgaccacatcaaggtcaccgcatcgcagtaccccttcccaaccgtctgtgccgacaagcagtcgaccgtgcgtcctccaatcagccgcccactcggaccactcgctgaccggtctctttttctcaggactggttccaagcgatccagcgcacgctccggtggaacgaccgcgaaaagcagaagtcgtttgtctttgtcgaggagccccggcagcagcagcagcagccggcgccgaaaccgctccggccaccgagcttggcctcggcagacgacgatgatgagccgatggcgacgccgagaggaggcgagtcaagggaacttgcgctcgacaacatcgaaccggacgacgatgaggacgaggagacgtttgacattgacgagtgcgtttgcccctcgacatcggcagttgttgactgaagtctaatgtaatctgcgccgctacagctcctcgactgccgctgcatcgtccatgaactcgccgccgcagacgccgcaaagccaagcagcggtcgagccaactttcgcagacggccttgcatcggcgcaggagaaccacgagaggactcaggagcggtcgccgtcctcggcgacgtctgacgacggccggctaccgagcaagtcgggcatccagacgcccggccgctacgccgacccgctcgcccagcctcatccggccaaactcaacatccgccacattgtgggcgcgctctcgacgctcgacgggagcggcggacccgtcagtcggcgacgaggccaacacccgtcgagcaagccgccggcgcttaagcggcgaagcagtctgccggcgccgatcaaggtcgtccctcgacccgaaggcgaggagggccagcgggacgacatccacgacccgacggccaagcgggcgagcaagtccaagattccgcgctcgtccgaacgcgcgcagccaaccgacctttccccgacgcctggcagcagcggttcggccgccaacctcacgcccgaggtgtacgctgcggccggtcagacgcctcggccgcacgagcgtatgcgccggcacggctcgccaaggcatcaccactcgcgccacgcgggcgagcaggcttcccccggtcaggacgcattcgccgtcgcccctggcagccaatcgggccgcgcaggcaagtcgagcggccgggcctttgccttctttggcgccgacgagagtgaaagcgacagcggcgtgagcggcagcgacgacaactagagtgcgcgctcggccgcctcttctcctgcacatcgtacagaggtttctgtcggacaatcaccctatcctctctgcaatcatgatccacgttgacgacccgactcgtcatggccgggtaggcgggcgggcgagaggccaagccggtgaaaggagctccctcgtccggtgcagtccccacctgcccgtcggtctgcgactgcccatggcgccctttctgcccgtctggccgtctgacctaccgtctcgctgactgtcacttccagcccggtcggtacgagccgtcgactgacgcattgcaggaggcgagactaggggctgtcgacgtgggctgctgcgcgtccgctcttgcgggcggctgacctccctttctcccccggacctcccaaccaccatcgacgagtccgctcaacagtcaccccttccgacagatacaccgctctcatctaataaagacctctatctgtgtctgcccatcatggcaaacgaggtcagtcgccagcttgtccttcgcgcaagggccctcgtctccgggcagctcggccgtcgagagagagggagaaaggccgtccttctcaccagctcagctctctctttcgctgcctcgacggcttcacggcagctcgtaccggtcgctgactttctcgcattgtttgcaggccatcgaagtcaacccaccgaacgcgtgcgccttagtcgccgtactccgcctctcgcaggttactgaccgagtgcctctgcctctgccgccctccctcgcaccgcgaccccttcctttccgcattcgctcggtctctcatatttccgcaacatactcgtaaacaggacgatcgccatcacccggcctggcagctcgttcaactgggcgtgcgttgccagcctgctgcgcgtgtgagtctcgcggaccccttgctgacgaccagttcggctccctctgcccttcaggtggttttccttcctcaccgccacacttctcggcgtcatcatctcgctttttgtcgtccgtcggactcaggtgcgtctactcggcgcaagcgccgtctctgcggcagacgtactgaccgcgtctatcctacccgactattcagcgaacctttcaccggattgccgtcatcatcctcttcgttctgtcgattgcctacttcctgatggcgagcgacctcggtcagtgcgcgtcgcgtctttgcctgggcacagattggatgggggctgacctcggctgtgcctctccgtcttcgacgagcaggagcaacgccgatcccggttgagttccggggcgacacgccgcggacggccttccgctcgagcgacggcgtgccgactcgccaggtctggtatgtccggtgggtcgcgtacgcgctcgtctggccggttctcgtctatctgctcttgctcgcgacggcccggccggttagcgagtacatcgccgccgccttctgggccctctcctacgccgtcctcctgctcatcggagggctgatccggagcagctacaagtggtacgccccggcgaccttttcgagttgctgaacttgggtcgctgactttcgccgtctctcgctgcaggggcctcttcgcgtttgcgctctttgccatgtttgtgcgtaggcttgaccgactggccagcttcgaccatctcagcagctgatctccaggtccccatgacagtgctctatgtacgaactgctcgttcctggcccgcgttcggctcggcgcatcggacccagctaccagtcggcctacctcgtcgtcagtccatcaacaacccttgacgcatgcaaagcaggcagccgctgaccgtctcctccttctcatccagcccaccgtcatcttctggcaggtcttttttccttgtctgccggtctgagggtagggtgtgctgacttacaacgacgtcccaactcgcagcctgctctggccgctttacgccgtcgcctgggccctcacctcaggtgccaacgtcatccggcccaactcggagatgttctggctgggcatcatcgacctcaccgtcgtcgcgctcgtcctcctcgtctttcttggcctcgtcggcgacgtcgaccatgatggctaccatcaacacagggtgcgtcttcctctctcgctgccctctattctccaaccaactctagactgactcccccgcgctctctgaccgtccacagtggggcaacgaggacgtcctctgggagaagtcgggccgcgaccgcgactcgtctgaagtcaccggctcttcaaccggcgtccgctcgaccgaccacgcccgcgcccggcagacctcccccggcgcaaccggccagcaggcccagcaggtccatccggtcgcttcatcggtcgtaccggtcgcgccttcgctcgagacgactggccagccggtccagacgacggtcacccgctgatcgcctccaagacacgtctgcatcctcggcaccgatgctgccgtcgaccctctcgcatatcctctgtttctctatccgcttacggccctaattcatagcagcgtaccctggccggcgtctgccccctgtcacttctcatctcgtcttgacccactcccgccgctttcccttatcgactcccgtcgcctcgtctccttacgcctctcaatcactaatcgctctgtgcggctcccgtttccgtattctctatcaccatgcacgtccactttcgacgacttgattggttgatagacgacaggttcggggtgcaaagcgagactggggacggggatcaagcgggctgctggtcagagacaggagcttgaccaagccccctgcggcgccctcggcagaggcaaaggagggcatcgacccgaacgagggcgacaagctcgtcgccggctcgtcgccggctgagcgggtctcgaagaagggcgagcccgagggcaagaaggacggcaacaagacgtacacgctcgaggaagttgcgaagcacaacactcgggacgacatgttcatcatcgtggacgacatggttttggacgtgacgaagttcgccgcgtacgtggtcctcctttctcgacacttgagtgcgccctccgcgactgacgcgcgctcctttctctttgccttgcagcgagcaccccggcggcgagcaggccctcgtcctctacgccggccgagacgcgaccgaggaagtgcgtcactcgctcgtcgtacgctcgtgcaaactgcttgacgctgacttgtgttctacgtcttccttcctcccctctcctgcagtttgacatgcttcacgaccgcaagggtgcgtcgcctctttctcggagtcctcgctcgaccgcttagttgaccccaactcgcccctcgcctgcagtcatcccgcgctacgcgcccgacgccgtcatcggcaagtacgtcaagtgaaggaaggccgctctctggcctgttaagctcactcgctcgctcgtgtcccgacgctgcttgctctcggccgccctttctctctttcgccccgcctttctccttctgcggttctccctcacgctgttgtcgcccccgtcccctcctgccgtcgcctgtgacacctcccggctcctccttgtatcaccctctcttacgccctcgtctctcaatccgattgccatgaacctctctacctcgaactgtagacgggcggttgggcccggtcgtcaacaccccccccccccggccctcttgatcccctcgcctccctgctaaccaccatgcccatctgcctcctcacagacctcgccggcgatgtcggttatgagacgtataaggcccgcaaacaaggccccacccctcttgaagctgccaacttctctgagccggctcgtctcgcgctctacgcgtcgaagcgcgccgtcttccagtcggtcgcctcgatggcgctcccggccttcaccgtccactcggttgtcaaatactcggccaaggccttcgtcaaccagaagaacgtccgcgtccgggcctggggaccgaccctgaccggtctcgctgtcgtgccgtgtgcgtctcgttgcagcgtcgaccgcccccgcgccaagactgaccttcgtccttccctccctccagtgctcccgtacatgtttgaccacccggtcgagtgggtgacggacgtcgtctttgacaaggttgagcacgcgctgtccaccgtcacctctgtccccgtcgcaccattccctccgaagcctgagctctgaggcgcagtaggacgaaaaaactcgcaccgggtgagcaacgagactgtagaggaccaggagccgattcgcgtgcttgctttttgttgtgctttgacagcggggtcaccacatgaatcgcatccagccctcctcggccggccagcgaaacttaactgtcagaaagacgccgagcgcaacgacgttgatcgcggcgtaccatccagcctcgagaacgggcacgtacgaggcgagatcgacgccggttgcctgcgattgtgcttccttctttcgccgcgcgagccccaagggaggcgggttagcggctaggatgcggaggatgacgaagggcgtcaggaagtagcggggctcgatgagaggcgtcggcgtgagggttgcaatggtacagaggaggaagaggaggagcggcaagggcggctgcgttcggactggagggagtggcgcagtcagtcatcccggagcgggagtcggcttgagagacgagagggaacgcacaaagccggcccgcccaaaggactccgcaggcgacgtaaccgggagcgagaatgtatcgggcgagcgggtgagcgttgacaatgcgccgccagaagtagaaggcatagtgccggttatcggcgaggaggaacgggtgggcgatcgtgaagtgcttgactgtcaggagcgtgagcccgaggacagcgcccatgtgcagcattgcactgctggaaagagagcgcgtcagcccacgagctggcctatgcagcataacgacacgcactgcgggcgcccaactgagtccttgactgcccttgccgcaagtcgtcgaagaccgacgtcaagcaagataggcccgccgagggccgtcgcaaagccaaaaaaataggccgtctgtggcaggtggagcgatacgccgtgatactcttgatgaccaaggacgatgccgccgttccagaggacgaaggcgacaaaggcaaagaaggttggcgtgtaggacgcgatgaccggcaggaccgttggcaggttgctcagaatgacccacggcagctccagcaccgtcgacacgaaggagcctgaagagcaggatgatgaggtcagctcaattgcagagcacagtcaaacgagacggactcaccgaaggagtcgtagtcggccgccaggcgctgctccctccgcaggtggtctttgcccgcggcgaccgtcttgccgatctcggcaatgtccgcgcactcgtcgagcacggccgcgccggcgataaagctgagccagatgacatttgtctggcggaaagcgagcgagaggaggccgagctgcgaagagaggccagccttcagcaacggacgggtgggagcgcgggacgaagcgcagcaggtgcagacacgcacgaatgaggcgccgagatgatggcctctcctcgaggcgagccagctcgccaggatcagagccacgctaccgacatcggtgtagtagagatggccgaagaaccaaagcggcgggaagagggcgatgcggacgctctcggctagggtcgaaccccttcgagctgggcggaacgacctgagcagctccgagacgagccagggcaggccgagcaagagagcgaggttggtcgcccgcaagacgggtatagagcacggcagccgcagcagggtgatgagcagaagcgagaggagatagctacgggtcaaaggccgtcagcagcctggcctcaggtcgggtcggaacaagggcctggggttgaaggctcacagtcctggcggcgtcgttagctttgggtcccacgtccaaaagtcgccccggcaatactgctgggcctgggggatgtggaagggctcatcctgcaccgattagaggtcgaaggggggtcagcagcgtcgacggcgtggacaagagcgagcttcccgggagcggaccatgtagggcgccgggatctcgagctggacgaggaggaaggccccgatggtgaaggcagcaaaggcagcgtacgcgagcagaccgctcgcctcgccaccggcactggccttacgcctagagagggcttgaccggccatcaggcaggtgtgagatgaagcagttgtggtcgtggggctcaggcagctagttcggaggcgggccgtcgtgtcgcgcgggccgctgagatcgagatcgtgcggacagacggtccggcacttcgcacacgtcgacaagatgcgtgatgggacatgaagcattaagggatacagtgggtgagcgaccgctggtcgctgcgccgtctagaccgactctaagggatggtcgccgttgaaaaaggtcgaggtgccaaagagcgtccgcacgagcgtcgtcaggtcgtcgacggtccggattgcctcctcgagggcctcggcctcggcaaacgtgtataggaaagcggcatcccgatgaaggacggccgcacgcgaggcgttagcctcgcccgagctgagcgcaatgtcgccgaggctgtcgtctgggtccgcctgggtggtgaggccgccgccgccatgcgacatcagacccctggtcgagcgaggcaagagtcagcactgtactcgcagttaagggcgagcatcgctggagctcacttcagggctgagatctcccagttgcggacagccagggctggcgacggcaagaactgcggcatcggagagcgcgatcggaaggacgccgtgcaggcaaacaggtgctggaggatggcatcgatgtcagctcaccgggtaggctgcacagacgcgaaagggcgacgcacaatcatgaccgacgagacaagctccttacgctccttgagcacgtcgagcacggtctcttgccggggaatctgctcgcggatgacggagactaaacgcatgtcgagagttggggtcagagacgtgccggttgggcgaatgaggcacgagcacgtactctgcatgaagatgtctgagaggttctgggccgcgtcgatgaccttgcggtaaagcgagagcggcttatggatcagagaaaactcgagccgcatcgtgctcaggtggccggacgaccggtcgaggtttgtctttcgagacagagcaattgtcaagtgtctggctgcgggagagtggatagaagagcgaccgcgcacctcaattttctgctgcagtcgtcctgctgtgacccgatcaagcgcgtagcgtcggccgctcatgttgcctcgggccatctgcggacgggcgggtcaaaggtcagcgctagcgaggggctggccacttggaaagggccacgcacagccagatagagcttcgtcaagtcatcgagggcctcggccatggtgtcgaggaagaggccgcgcgagcgggccgggaagatgaactcgttggcgaggacggcggcaacgatgctgttagaatcgagtgtcagctcctccgtgagtctgtttctgttggaatgaggcttagaacaacgcacccgatgcagacggtcgccgtccgtttgagcgccgtgttgacatagccgtcgttcggcaggccgaggtaaccaagaaagacgatcggcggcaaggtgatggttccgacgacgccgacgcccgggaaagacgaaaacagcatgattgccgcagtcagggcgccgaagagcgtcgtcaggaagacgagcgcgtagggatcgtcctgggcgatcagcgtgatgaggcaggcgagaatggcgccaagcacggtgccgatgactcggaaggtgccgacccgccaagtctgaccggctgacgtctcgaggacaaacagatacgagatgggaatctggcgcggtgtgaggggtcaggatcgagcgaaagcgagctttgagcgctaactcgacgcacccattcgccgcggatcatcttgaaccactcgcggccgctcgaatcgaggggtaggaaggccggcagagtaagcagcacgacgccgagcccgatctacaagaaggggaaggccgtcagcgaatctccagttgtcgcaggggactcgacggcagcgtaccttgaaggcatgctggatgtgcgtccgctgcttgtgcacggtatggaggaaggctacgagcttcatgcggcctgaaacgaacagcgttgtggatcagcgacgtacggcagggctcatcagcgcacaacgcaccgacgacgaccgtctgcgagtcccagatgggcagcagcttctggctcatccaagtaacggtcccgatgcgggccttcttctcctgcggttcggcgaggaaggcgttggcgatcgccgcacgggtctcggttcctgcaaagttctcctcctcctcatcggctgcagttacaaagaggtcaggcctgccctggtcaaaggtcaggctgacgcgcacgagacgcacctccactctggtcgcgagccgtttcgtcccaacgtgcagtgacagagttggacccgagccactggcgcgatagccgtggtaggtgaatcgagcgcgagcttctggccgtcgagctcagcgaaaacgtcagatcgaggacgtcctcgagcgtttgggcgacctgtcggagcgatgcgtcagctctcgcactagtcgagagcatgaagaggagccgtacctccaagcatttgtagttgaagagtgagagcagtaggaggtccttgtcgagctgcggcgagccgtcgtcgtcagactggtcggccttcgtgtaggcctcccagcgctcgatcgccgcgtcgagctggcggtccgactcgcggataaagacgtttcgctgctcgcggagcctcgcctgcgtgtcgaggatgagcgggcccacgtcttcaccggcaagcgtccgatggacgacaccaaacgcggcaaccatgccgccgataaacttgcgcgtcggctgctcgaacgccgcgcgcgactttgcccggccctcgaagcttgcccggcccgcgctggttgtctcggacggcgacgatccggtgaagtacgacgtgccagccgcgaggtgctggctgagctcgcggatcgacgcgatgaacggccggaggtggtgcgggtggtagcgcgagagcgagacctcgtacgacgcctgggcaaacgcctttgggagttcggtcgactggctgagcagctggcgccggagcgcagggacgtttcgcgcccgaggcgcctcgagctcgtcgtctgatgcgtcgcggtcaaagaagtcttcgacgatggcgagcaggagcgtctcggacgtctcgaacgcctgctgcgtcaggtggataaagcggccggccgacgtcttcggaaagagcagccgggcgaggaggctagctccggcggcgaagagtgtcgggtagaggaggataagcgggaccttggccgtgagttcggtatgcccaaaatcgttggcgcagatccagatcgagtggaacagggcgatccgggtggccgacgtcactggcggtggcgaggacaggggcgagcgcgatggcgggtagcaagaggtcagcgcttggctttgaacagcgacagaagggtcgcaactcacatcgcggcgagcttgaccgaatgtaccctcctacgaccgactggatcgccagaaagaacccagcgaggatccggctcccgatggcctcattcccgccgttctgccggttgagctcggccgcagcagctacgccgacgcacgaccaggcaaggccgatgagcccgcccacgatgccgaggacggtcgattcgagctgggcgccgaccgtgccgccctacaagagtcgccggaggtccggtcagctctgggtgagtaagtaggtgggcgaagcgcggaagggcagactgcgcgcaacgcaccgggaagaagaagaggacctggatcgtcaacacaaggaacgcatacctgcagcgcgacgacagccaaatcgtcagcaaggctcccattgccgaagagcagatcgtgacgcgcttgtcagaaagggccgcgaccggcttgacgacgacgaggacggcgcagaggaagctcgctaggacgggcgcgccgagcttgcggacgacgggcgtcgagcgcgagacgaggcgcgagagccggcccatcgagcgccttgaaagggcgagaaaggctgagagctgaagaaagtacgctacggtagccggcggacagaaggtgggcgtcgtcggagggagggcaagcagggcttgacttcggctgacgcttcccccttgccggccgggcgcttccgcacgtcaggctcgagtcgagcgccagggtcgacattgggatggccgtcgtactttctgcccagaacgagacgtgtttgcacgcagactcttgcaaagggtgcatgggagagagagacagactacaggctacagtgttcgaacgaagacagcgctcggttgggggcaggcggggggtgcagtcaagcgacaagaggcgaccaggatcgtcgacatcgcttcgcaggaagacggcgagggcagccaagtccgagcaagccgctcaaaccttgtcgttccagtcggcaacgccatcggtaccgaccttgtccttgatcagctgctccgacagagcccaaaggttgtcgcggagctcgggcgaagcggcgagggccgtttccttgccgggcgtcgccgggtcggtgaggtagaaggcgttcatcttcttctcctcgacctcggggtcgcaggcggcgtagctggggagaagggtggagtagagtcagcggacgagaagtcagaggaagaagggagaggacgacgcacatgcccgagtacgagccctgctcggcgtcgcgggagagggcgagcgtcacgccctcgatgatcttgccggcgaccgaaccgtaggcgtcctgccattcgtcctgcagcggggctggggaagcaaaaggtgggaggtaaacttgtcagattgtactgcctcttgtgaaggccggacagcgcaaacgggaggatcttgggacggactgttgacggtgcctgtaagagatagaaggatcagcagaagccggagaagttgacgggcggcgcaggacacgcacccgggtggaccgcgagcacaaatacgttgtcgccgttgggcttgatgaccttctcgtagatgcctcgcatgccgcagatcatagcggccttggtcatcgcgtaaagctggatcggaccaaactggtcgttgttgatctcggcgagcgacgcgaacttaaggtcggacggggcgaaacggtggagctcggacgactcaaagacgatgcgcggggccggggcgccggggagcttggacgtcttgcgcataagcgggtagcactggatgaggcgagggacgattatcagtcgaggaagacgaacgacaggacgacgcagagaaaggtccgaacctgcttgatggcgaggtggtgcccaaagtagttgacgcccatgtgccggttgacgccggacgcacagaggccgtacgtgttgacgttcagcccggcactagcgatgaagaggtcaaggcggggttcctctttggcgagctggccaaaaacctgggctgtctgcttgagatcgcccaggctgcagacgttttgcggaccgagcgggacagtagacgatgagggaaggggggggggggcaaagatcgggaagcaggcgtatctctggcctcatttacgaggagacccgcggcgtcctcaagatcttcctcgagagtgcgtcgaccttcctcccttgctcgtcgccctgtcgcttgcacatgctgaccttgcgcctcctgcctcctcctcgcagatgtcatccgcgactcggtcacctacaccgagcactcgaagcgcaagacggtcaccgctcttgacgtcgtctacgccctcaagcgccagggccggaccctctacggcttcggtgcctaagcttgggcctctgtcgtgcttctttgttcttcctcgcccggtccggtcgcttgctcaggacatcaactgtggcccccttcccttcgcctttgatctccctctacatatggtcttcgtctcaattgcttgtcggtggctgcgggggacaatgatcgggccgctcctttgtcagcctgcaagctctcgcccagcgtcgaccgtcgacttgtagcgagactcgaggcgagcatgctcttgatgggcagcagtcagggcgaggcagcaaaatcggccgtcttgcatgcctcgccgccggcagcgaagccggcctcaaggtcgagtgagtcgtccgtctcggcccagcccatgactcgctgcgaatgcgctttctctcgcgcaggtccagcgagtgagattggatggggctattcatacagcgctctacgctacaatgaggtggtgaaaggtgtgacagaacgtttcaggcgatgactgggccgagcgcagctttgaccgtctctggcgaatgcgaaaccgagactcgtggcgtattaagcgcggtcgaggccggtgttgggtacgagctgctcgcaggtgtcggcggaggggacagatggtcgtcgctcgctccgctgctgccgggatcgaccgccgggcggggaacggcacctttggcgagcgggatgagcgaccgtttgaggtagtcgttcatccattcggcgttgtcgatatagaggctgaaggggagaagcgtagagtgtcagcctctcgtcttgggagcagtcaggatgaaggagagagcaggacgcactggtgaccagcctcgggcgtgatggcgacctcacagagacggttgccgaccttgcggagggcgcggacgcagtccttgccgccgtgccggtccatccagtcttcgctgccgtagacaaactggcacgggacgtctttgccgagcgtgtgaatgcgctcggcgatcgggaaacgcgcgaatgcgcccggccggaggaggatcccaacggcgtactcgcccgaacccgggaggagggtgatgttggagaggtaggcgttgagcgccgtctgctcgtctagctcgagcccaccgaagcgcgccgtgctgtacttgccgagcatcaggggcccgatcggcccggctttacgaaggaagccgagcgggctgtagccggcctcccacatgtaggcatagagccgctgcatgtgcttgccgttgccgagcgggcccttgaacgtctgcggcttgcggtcctcgtcgacctcgtcgtcgtccgtcagcgggtcctcggcgacgacgccgtcttcattcggaacggtgcccgcctgaacggcagcctcaaacttgtcggccgccccgggcgagtcccagttgtcggcgctgttgtgccgctcgcgcaaggagccggccggtccagcgacgtcgcgcgaagtagaccggatgagggcctgctggagccgccggccgtcgatacctccgcgctcgctgccctcggctggcgactcggcggcgggcgtcgtcgacgactcgccgtcggacgggtgcgacggtctccggctctggtttgtcggtgtcggtggcggagtggccgtcgtcggagcagggtgggtcggaatgccggccggtgagagcagcatgagcgagcgcgtccgattcgggtagcggagggcaaaggccgcagcgaggtagccgccgagactgtggccaatgagcgaggccttggtgatgcgcttccggtcgaaaaaggcgatcagcgggtcgagaaagaaatcctcggcctgtgggcggtgaaggagtagggtcagcgttctgaggaagcgagtggagtgtggcggcacgtaccgcccgcacgccgtcctcctcgctcatcttgcgcatcggcgcaaacacctttgggttgatacgagtcgagcggccgagccctgtccagtcgaggaagaacgtccggtcgcccgtctcggccgtcactgcagccatcgtttcaaactgccgccagaaatgcatcgcgccacagccgtagccatgtgcaaagacggtcgcctcgcccgactcgccgtcatcggtcccgacggcggccgctggtccacgcgagcgccggatctcgacagcgttgatgtgctggcctggcaggacctcgagctggtactgtcgggcgacgacaggctcggtcgctgggtccgggtcaggctcgtgctgcatgcggctgcggatgagaatgacttcggtcagcacttttggcccgaccgaggtcgtctcgacgagcagaggacgcacaagtagggcatgcgactggcggtatgcaggaaaagcgacgaggtcagctttgagcacggatctctgccttttggaaagacaggaggggcacccaccgcaggatccgaagctcgctcctctcggcgtccttcgtcccggcctcgagccaggctctcgtcgcgccaaagaagccggtcggcagcggtcgagccggcttgacctcggtcggcgcaggcgacaggcttcggcgccgagcatggtgcggactgccgttgcgggacgaggaaccggccgagcggtcgtggtcgcggtcgaggtcgagcgaggtgctggcggtggaggcggcagccgaggacgacgacgactccgacgacgccgagccacgaaccgccaggtgagggaggcggaactcggggagatgcatgttgagatcaggaggaggtcgtggtctgctgctgagagctgctctttgtcctctctgctctctgctgctctctcgcccggcttatgagtccccgaggctgactacgacggctccagggcgtcgtcaccttggccccgccggtcccgagcagcggcggccgaagatagaccttcgccgctggccgacacccggccgccgccgcagaggcggccagaagacaacacactggccgttgcacaacatactacagtcgtctgccggctgggcgcaggctacgtctggctgccttgctttcctttgcgctgcaccacccgaatttaagtgtggggatccccagcttgacaggtcgctcgcttcgatccgctcgccctcgctcctcgcccggccctgtcactcggccctcgcctactatcggcctgcgtgctgcgtcgtcgtgagattgagcgtttctattgcgatccggccctaggtcggctagaccgtgtgcgcgggcgaacgtctcaccgctcctgcatctcgtcgccgccctcgcccatgccctcgccgcccatcgtctggacgcctcctcctccctcgccaccctcggcccccggccgccgggccgagacgacgtcgtcgacccggaggagcagcgtcgctgactcgatcgccgtcttgagcgtctggattttgacggctgccgactcgtaaaggccgtacgtcttcatgtcgacgaccttgccggtgtcgccgtcgacgccgaacgagtgctctccgttggcgtgcttggcctgtagagtcgaagagagcaacgtcagccgtcaagaagagaagtacaggtcgcaaaaggcgagacgcacccgaagatccgtcagcacgcgcatcgcgttgccaccgcagttctggatgagcgtccgggggataacctccatcgcctccgatatggccctgagcccctcggcatcggcaccctccatcgcccgcgcctcgcggacgagcgcgcccgagatggccatctcggtcgctccgccgcccggggcgagcaaggggttaaagacgacgttgcgggcgacggccatcgcgtcggccaggttccgatcaatctcggacaggatgtcctttgacgggccgcggaggaggatcgtgcatgccttggggttccggcactcgtccatgaaggtgaagtatctgggcaagggcgagagcggtttgctcagccgggcgagtcgatcttccaggctaagtcgtgactcactcgtcgccgagcttctcgatgtagaagaggccgcagccggtgccgacgtcgatctcgcgcaggtcctcgacccggttgacgatggtcgcgccgcacgcgcgggcgatccggttgttgtccgacttgcggacgcggcggatcgcggtgatgtcgtgcttgagcaagtagtgctgggcgaggtctgcaaggaggtggccgtcagtcagcgagatcagcagcagcagagggccgaggggcgacgacgcaccagagacgcccttctcggtaaagacaatgtcgggcttgaatgcggcaatctggtcgcacatgagcttgatctgctcctcttcaatctcgaggatccgtgcccagtcctcctccttagcaatctcgatgttggtctggctctcgcccttcttgtactcgagcgggcagtcgagcaggagcacgcgcgggttggcgatccgccgccgcatcttagggtgcgtcacgtccttgttgatcatgacgcccttgagcacccggcagtcctcaatctcgccgccgggcaccttctcgacccgggcatagcgcttgaggtcgatcgtctttgtgacggtcgacgccccgccgtcctcggcctgggcgacggtccggacggcgtcgagcgcgagcgagcacatcaggtcagaccagcgcgacgagaactttgttccgatcgacgtcttgatgagcgcgagcatctcggcatcgtcgtccgtgttgatcggccgcgaaatctcctcgatcgtccggagcgcaatcttgagcgccttcttgtaggccgaaatgatctgaacaggatgcagcgagcgctcaagcagcgggagcgagaaggcgaggatctcgccggctgcgaaggatggtcagttggtcgcgtcagtggttgccctctgcatgctcgaggccaggggcaggcacccgcgagcaagctaggggcaggaggagagacgcctgcgcgctcgcctccctcccgagcgaaggccctcaagcgcacgacagttccaggggactgacccaagataatgacgctcgtcgtgccgtctccgacctcctcgtcctgcgtccggctgagctcaatcatgctcttggccgccgggtgggcgacctcaatctcgcggaggatcgagtttccgtcgttcgtcaggacgatgccgcccatcgggtcgaggatcatcttgagcatcgccttgggtccgagacacgtccggatgacgtccgagaccgtcttggaggcgtggatgttagccgtctgggctttgcggccagacgtccgttcggggccggtgtctggtggtcgagccggagccgtcgaaaagcgtgtgcaagcgagggtagagcaggaggatagcggcgacgccggcagcggtcgcggtgagagtgggagcgcggcgacgaggaacgtagcgaaccgaggtgagcagacaaggaagagggcagcaggcaaggacaaaatgaggagctcgtcagtcatggcaggctcgagctcgagaagctgcggccagcagtgaaatcgcaagggcgaccgtcggccgcccgagaacagctgagccgtatcaaggaagacgcactcatgacgaagacgggcatttgtgacatgctgggcgagagagacctaggccggaaagtagaggagagagtcggggaggagcggtggtgatgaagggggctcgagtagatgcagcgtgcggttgagctcgtcgaagcgcaggcgcgcgcgacgcgtgaagcccgattcaagaatcgacattcattcatcaacttctcatcttctcatctcaaagtaaaggttgagcaagcgccaagggcaacagcaggctatctgctcctttctgagctggtcaggaacaggatggatcagattcttcggtgaatgctttcgcatgccgcgaggagagttgcagtaggcgagagggagttgcagacgcctcgttgcgctggctcgcccgtccccgccggccctcgccttcgttttcgacgcgagcgcccgctctgtccatccggcgcccttgcctcaacccttcatctgcccctcctccctcctcttctttcttccccactttctctctctctcttataatgtcgtcccctattctcgtctgcatgggcaaccccctgctcgacatccaggcttcgaacggcgaggacctccttaagaagtacgagctcaaggccaacgacgccatcctcgctgaggacaagcaccagggcctgtgagtcggacctagcgcctttccgagggcccgacagggacactgagcgctcctcttactcgacgctgcaggtacgaggacatcgtcaagaaggacggcgtcgtctacgtcgccggtggagccgcccagaacgctgcccgcggtgccgccgtgagtgccgcctcgctccttctttcagcccacattgagcgagccgcttcggctggcttaggtctgcttgcggtcttgggagacgaaggagagctgctctgactgatgccgcccgctcgtccgccgacagtacgtcctcccgcccaagtcggttgcctacctcggcgccgtcggcgacgacgagcttgcctcccagctgcgcgccgccaacgagaaggagggcgtccagtcggcctaccaggttcacgccggcaagaagactggcgcctgcgccgtcgtcatcaccggccacgaccggtccgtctttcgccttgacgcaccctcggtcagctcgctgactggcttgcttctgcctctagctcgctcacgaccaacctcgctgccgccgagctcttcacgcccgagcacctcgcctcggccgaggttgccgccctcatcgacggcgccaagttcttctacctcggcggcttcttcctcacgcacggcatcgagtcggcgctcaagctcgccaagaagtcggccgacgacggaaaggttggtctccaatcgccgcctctggatgttgtggaaggccgctgatgcccgccgttccccttgtgcagtgcttcgccatgaacctctcggcgcctttcatccctcagttcttcaaggagcaggttgaccagatgattcccttctgcgacatcgtcatcggcaacgagtccgaggcggccgcctacgccgaggcccacggtctcgccgacaaatcgcccgccgccgtcgccgtcgccatcgcccaggtcaagaagcagaacgcttcgcggccccggctcgtcgtcatcacccagggcgccgactctaccgtcgttgcgacctcgcacgcctcagcctcggcccagaacctctcggacgccgaccccaagacgtacgccgtccccaagctcgcggccgaccagatcgtcgacaccaacggcgccggcgatgcttttgctggtggcttcctcggcgccttcgcttcgggcaagtctctcgacgagtgtgtcgaggctgcccacaagatgggccagatgaacgtcggccaggtgcgtcatcctcctcgtcccttccgcctttgtcaaactcgcgctgataaccctcgctctcatccaggtcggcccggccttcaagttccccaaggtccagattctttagagcctctggtccctccttggcatcctgcgacgacccgttttccttgcctctgcctttcaacaccggccctcacagacgtgaacgcacagtcccctccatacgccttttacgaccccccaaccctttagaagacgcccgctcggtttcaacattccgcccgggtgctcctgacccgcgcagcgatcaatgtcgctgctccggacctgcggtttgcgcgaggggcttcgaggcaggacaagagcgaggatgagggagcgagcgtcgagcgcttgatccttcgaaagagcaggccgacttgaggcggaccgggcgagcgccgtccctctcctccccttccttctaccctgccgtgctgaggcaacgaccgccgccgagcagccgctcgtcccctcaacgcaggtcggcaagcgtcgcccttatccgaaaaatctctggcgcctgctctgctgaaggagccctcgttccgttgtctagcacataatacaaggtcgtctagtagccatgcatggtcgtcaagtcgtcaatctccctctccccttcaccgcgccttgcttgcgagccggcgcaacaccttgacgacgtcgcgcagctgagcaaggccttcgagcgggccgtcctcctcgtcctcgtcctcgtcgcggtcgggctgaggagcggcttggagcagggcgagcgtcccttgccggcggagaagctcgagccccttcttggtcttgttgtagctgagcgaccgacgagtgaaggggagatgtctatcagcgagagcctctattgcatgatgcaggggacagggggcgtaccggacagcgtagccctcggccgtgatcgacatggacatgaggtctgcgagagggcgactatcagcagggcgtccaggcagacgacgacacgcgcaataacgcaccaaactcgacctctttggccgtgtcgtgcaggaccttaaccctgcaagtggaaggcagtcgtcagtcagcgctccacactgacacggcagtctgctcggtcggacctacttcttctctttggtcttggaccggctgctcgacccgagccacgaccaaatgtcggccgcgtaacgaccgccgaggagtgaaatgcgaagctctttggcgatcgccctgagacccatctcgcgcaccttgacctgtaagcgcaagggaagaacgagagggtgatcagtctcacgctccttcagactgcgacgaggcccggacgcacagggatcttctgcgagaaggcgccagtcaggtcgagcgtgacctcctcgtacgcatcgtcgtcgtcttgtcgctcgtacgtcgacgggatcggggctgcagatgacaagccagtgtcggtcagcggagacgcagaccagggacaagacggcaactcaacgaacaaggcctctgagcgagcttctgcttgccattcttcgcggaagccgttggcggcggaagtgatggcgggggcactcgttgcgaggtagacgcggcggccgagctggagatcttgaccttcggtctcggcttgaccggtaccggcggcggtggcatctcgatcacttcgatgatttcgaccggcgaggacgagacctcgatgcactcgacctcgtcgtcctcatccagctgcgggaccggcggaggcggaggtggctgagagaccggacgtgcagctggaccgcgctgggacgccttcatctttggccgccccggagctctcatcggcagaggtggcgactcgatgaggtcgatcggtgggctcgggggcgcacgagtcctggccggtggtatgtacctcggaggagatggcgggacctcggccggcgggctcaagacccgagggatgggcaccttgaagggcagtctcgaccggcccgcagacggacgagtcgagcgaacaggagaggtgaaggcaaagggaggtgatccgggcagctccatcggcggcgaggagaggatacgacgactcggaccggcagtcggtggttcgtccgcggcagtcgacgacgacgacgccgtgccgcctgccgaggcgaccgctgacggcggcttgaaggccccaaaggcgttggctggcgccgatgtgactcgtttgaagggcgtcttgaacgagttgtgcgttggaacgcgctgcgggccaaggccggcggctgcggaggcgcgcgatagaaaggtgtggtcaacggagcggtctgcggaggcgatatcggcgtaagagaaagccgacgcactgcgggagatgccgatggtcggccgggagggagggagcttctcgccgacagaggtcgtacccgtcaggcgtgacctcttggcgaaagagggaccgcctgcaggcggcgaccggactggcggcgccggctctggctctggttcgaggtcaagcaggtgggacggcagctggagatgaagccctccgccggcgaagggctggttgccaaaggtgttgaggcgcttaagcggcaccgccggcctcgatggcaagagagctggcgctgggcggtctgccatcttggccggcgcgggcggccggaacgacgtcgacgccttcggccgcgagaagcccggcagacccttctcacgctcctgctggagaagggcgagaccagacgtcacgatcgccggatagacgtcctgagcgatgagatcggccggatcgacgtcgtcgccgtagccgccgccattgtcgaacggcgcgacctgggagtactgcgtctgctgcgaggcggcaaactcttcggacgagagtgcctcacgccgcttcttgactttggtggggtccttgcagacctgagaagagggcggcagagagagcggatcagtctcgatgccgtgctgccggccaagagggctgggcgcacatcgcacatgcccgagcagtaggcggccagcatcgtcgggtccttgtcgtcgatgttctcgccgaagaagcggcagatcgagatgtgccggcagaccttggccgtctcggcaaaggcggtaagctgtagcaaggcaacccttcgagtcagtttgaagcgagtccagagcggcgcagtgagcgacgcaccgcagtcaagctgttggtcgacgcattctcgccgccttccggaaagcggttcttcttgttggccttgcttctctccatctcggccagccgctgaactttaagcccgtcctcgcgggctggacgacgagacagatcagcggggtcgcggatgaaaggaggcgaagaggcagccgcaacgcacagtagtagaggacgcatttcgccggcccagcgtctcggcctgcgcggccggtctcctgatagaagcctgccggaaggagcagcaaagcaactcttcagcttcagtcaggccgactgagtgctcgggtcgaaacgcaccctcaaagctctttggcaggtcgtagtggacgacatagcggacgtcgggcttgtcgatgccctgaagaaggagagagcacagtcagcacttgacagcggcagcctccaccgccgttgaacatcgcgcaccatgccaaaagcgactgcgatgcataggcgagaccgtgttagccaaggtcaacgaagagctggctcgaccggagtaactcactcgtggcgcaaacgacatcgacgcgctcgctctcatcaaccggcgccggggcgccaaagtacttgccgagcttggtctgctcgccagccttcttcggcggcttggtgccggtccaggcgcgcatcgtcttgccgagcgtgccgctgctgagccccttgtgatacggctgggccttgatctgctttgtctggaggtagtctgcgatcgacgtgcaggccgccttggtccgagcgtagacgatgccggagacgggctgctggtactcggagccgtcggcagcctgaacgaccggcgaccggcgctgcatcgacaggatgaacgaggccaggtcggccagccggtttgtgtcggcctcggcgtacgtcgatcggtagcgaacctgcgagggaagagacatgaacgacgaacagacctcgcatgctgccgcgaaaacgcacctcgtaaaacaggttctttcggttgaacggcatgacacatttgaagaggtgctcgcggctgagcctgaggctgccgatgatgtcctcctggacgctagccgtcgccgaagcggtgagcgccatgatcggaatgtcaggaaactgggtgcgaaaaaagcctagcgcgcgatagtcgggtcgaaaggtcgagcctggagcacgggcaggaccgatgtgtcagttgggcgagcgggcgtgcgggcgggtgacgatcggggacgcaccccactcggagatgcagtgggcctgggagaagaagcaacggtgagcccgagtcatttgaggcagcagaggactggtagacgaacctcgtcgacaacgagtcggttgagctcgccttgctcgtggacgatgcgtaggttgcgcatgaagccgtcggtccggaacgtctcgggcgtcacgtagagcaagcgagtcctcgggtggcccgaggcgaggtccttgttgatctgggggcggcagatggggtcagactgtcaggtcggcctacatgcagacgtgggtgcgcgggtcgctgcaacgcacgagctgcttctcggccttggtcgactcagacgtcagcatgacgacgggaattttgagcacctgcagctggtcgacctctggaagaggagagaaggggtcaggaaacgcggctcagagccgtaggttccttcaaacgcacggttctgcataagggctgtagtagggaaggtggagcgacggtcagcacccctggccgactgcgcggtagctcagcctagccagacggaccgagcagcggcgagatgacaatcgtgacaccgtgctcctcggcgcatgctggaacctgaaagcagatgctctagagagggcgatgggcgacgagggaggtcagatgaggtaaacgcgtgccagcgcgacggctggccgcagcactcgaggacgcgccttgcccatgccggtcggcgcgacgacgaggacgtcggctcccttgacggccgcctcgacaatctcgcgctgcttgccgcgaaagtcggtcttgccaaaggctgtccgagcgtgagatagcgggtaagcgagctggctttcgagggaaagtggtgagcgagctcactcttctggaggatcctggaatgcgaagccagccgtaagaggagcgctcgatcagctcagcgctgtggaggtgagctcgatccaacgcaccgcaagcagtcgacctggccgctgataccccgccgaaacgttctcggcagcgtctgattcttggcgatctgttgtggcggcagtcagagagggtggtcagcttgccggcccaccccggctggagctcgagggtcggcgaccgccttctcccgctcaagggagcttcgcacctgggtcatcgtgttgaggttcgggtacgtgcacggcggaacattctcgtcaaaatcgacaacatcgtccgggtgggacgacatgctcgggctctcgagctagacagcaggaggttggcggcggcgaccgaaggggggtggcgaccaaccgacgcgtgtccgggagcggcgacgacgagctcgccgacggccgacgaagggtcgtctccaggcgctcgactttgacagagaggctgagatgtgcgtggcggggagagtctggagccaagggcgctgtgcagagacaagaggactgggcagtacgggtcgaggtgatggttcaggaggaggggctggtccgagcgcaggccgtcgagacgcgccgcgccgccgccagactccattcggcgtcgcctctgcacacacttcgatcaagaacaggcctttcagcgaacgagacgtccagtggcccgggcagacgattcccacaaaggtgctttgattcacggattcgactgcgagccgctggcaccctccgtaggcttggtggccgacgcctcgccctcagccggcgccacaccctcggttggcgcatcctctcccgcactctgccctgccggtgcagactcagtggacacctccgccgaggccgattctggtgagctcgcctcggccgaagcgtcggtcgcctcggtcgttgccagtgtaggtgccaactcggcctccacagcaggcgtcgatgcggtttcggtctcctcagcgggtgtcgatgccgccgcggcctcctcggatgccgtcggtgccggtgccgactcagcagcgccgactgccggggccgcagactcctcggacgcctctgtggcggccgccgctggctcctctgcgaccgcagcctcatcggcctctggctcggcagccagcgttcccgacacccaggcgttgtagtaggcgtggtcggtccgggcgtcaggcttgtactgcatgtcgagcttgtgggcgagcttgtagatgggctcctcgccccgcttgacgagctcgttgtcgtgctgccgtgcgcgctcaagcgcgtcgttgatggcctcgacctgggcgggcgtcaccgactcggccgaggcctgccagagctcgatcgcagcgtcctcgcccgcctcgtagtcaatcatcgggcccgatgcgttcacgcgggccatcagcttgtcgtagtcgagcgcgtgaagccactggcggaagtactcgagccggccgccgtggccaaagtggtcgaggtaggcccgctcgtggagcgagaggcacgccagcggcgtcacgagacccttgccaccgaggtcgggcgacgtcgaggctgggccagagtagcgctcgggcagccagctgccgggcggccggtcgggtgaccatgcgcgaccgcgcttcttctctaccggcgcaggcttctcgccggcgactgggggcgcgacgggctcaggcaacggcgggacaaaagcctggccgctgaaggggcccgactggacgcgcgacggcgagacgatcgtcccggcagcgtacgagacgcggaactcgataaccgcctccccgggatcactgttcgggcggtggcgcttgacgagccagagccagccagaggacgtcatgccgtcgatcgtccgggccgacgcctcttcgaagtcgcgcagcgagccgaacgacttaatgaggcaaagagtgaagtcgcggttcagactggggttgccaccttgacgctgagagcgggtaagtgtggtcagcgacagcgctcgaagcagacgacactagccgcgcgagaacgcacgaggcctgagaggaagaaggcgttgttgagcgcgttggacgcatagttaaacgccagcgcctgatcgggctcgcccgcagtgctggtgatcgtctcgaggatcttgagcgactcgagctttgtgcctgcgatggaaggcgcaagcggcaggcatcagctcgaatcgaggggacgagcgcgatgttccggtgagccgcacctcgcacttgctcattcaaccggtcgagcagaccctggtggtactctctgctcaggcgctagagaacgaagccgctagtgtcagcgctgcgtctcgcgacctcgctcgcgttgcatgtcggcgctcacctgaacgacggccggcggcaggaagacgttggcgctccttgagctctgcccaccgcgctggccgttcaccgacttcttcagctggaggttgtcaaacggcggcagaatgtgcagcgcccgagtcgagtgataagacgaggacgcgaccgctcgcggcgccatcgctgccgacgacggcggcagagagcggagcagggacgacatccggcgagctgagcgaggcggggttggtcgagagcggcgtgcgacgacgacggcggcaatgggctgagggcctcaatcggggcgggaccggcgcgagcaaaggagcgaacgcgagagctcttggcgcagaagatctaaactgctggcgaggagcagaggaggagctcgctacgtcttgtctgtcgggtcggaggttcgggtcgttcggagcgacgcggtcggagctcgaggggaacccttagacgaccatttcttgatttctggccgggcccgcgggcgcccgcaaacccttcaaagccggcgggttgctgggggggggggggggcggggggagagatcagcctgacgtagacggcccttttacaaatcgacaggcagcaacgtacctcggagacgtcgtgcgggaccgtcagcgacccagccttggcccgagcgacgatcgcacggaagcggtcgagcgtcgtctttggcggcagcgcagcggcgacctgctcgcgcgttttgcgttcggatggatagctcttcacctgcagcttgatcttgacgtcgacctgcgatcgattgggggttgcagcggtcagccgcctgtcttggctcagattgccgcgcaaagtcagcttggacacacggggaggagcgtgccgcccttggcgtcgccctcgacgagaaagacgagatcctgggcaaacgagaaggccgagaacgggtactggtaggcgagcgtctggtgctgaacgaggttggcgagcgtctgcaggttgtcgatgcctatacggagtcaatcgtcgccagtcagctgcaagtcgggcgaacgcgaagtcaggcaggccaagagacgcaccccgcgcattcagcttgccaccctcgcccatcgcgctctcgcgcacgtagccgacgccgcccttcggcacctgccaagcgcccgcctcaagatcctcctccttctcgcgcgcgcgcggcgcaaagctgcccgcgttgagaagcgggatcgacaggtcgagcgggtgaagcgtcggcacgagctgctccagcacgtagagcagtggcagggccggcggagcggccgagtccgagccggccggtgacggcgcgaggagggcgaccgagagcggcgtcaagggcggggcgttcttctggcagagcgcagcgagcacccactcgccgacccactcgtcctcgccgtcgaggccgagctgggcgagcaacgtgacgagctcggcacgagtctccttccattcgatcggcgacaagggggatagaccgtcgggcgagtcgccattggccggcgtatcgagcgggtgggtgtgcgcaaaggaggagaggacgtggatcgtcgggaagaggacggccgcagcgccaaagtcgtcgtccgtctcgatcgacgacataggcgagggcggggcaggcgagtgggttagaagacccgtcacggtgtggaccgtcgtcggagagagcgtcgcatcgtcgtagaactggcaagacagggtacgagaggggtcatcaaggctgcgctgcgagtgtggtcgttcggggcgcaaaacgcaccttgaggaaggcgccagtactctcgcgcaggctgccgctctggccggcctgagcgaagggatacttgtggcgggtgtcatggcgaagctcactcgtcgacgacgagccctccttcgactcagcgcctgatccgtccatgacctcaggcggggtgaggagcaaggctaagcgtcagccggctgaggagagcaagaggcacgccggccactcacctctgtcgcccagctcgtctcccctgggacgccgaccgcccagcagacgctccgctccctcagcttggcatagtcgatctcgcccgcgccatcatcgacgtcggcgtcgtccggctcggccgcagtcgccggcaggaagatctcgggcgcatacgacgtgtcctggagcatcgcccggaagcggacgagcgtgccctcggctgtgctgaaggtcaggaagggggcggaactgctagcctcctcgctcgagagagaggccagcagacgagagacggacgtcgtgtcggtcggcagcgcgtctgccaaacggtcgagggtcagcaggcgcacaagtaggtgcaagtgccaaaaggggactaacggatgtgggcgtgctcgcgcagcgcggtgcggaggatgtcctcggacgagagggtgctctctgacatgctgagcgagtgggacagtaggagggcgttgacggttgggggggtcggagtgtggagagctcgaggtgctcagcccaagctgtaagccagcaagcgggcgaattcgcaattgggcacgagtcgtccagagaccagagggacgaagccatttcatgaaggagggtggcacaatcgttggctacagaggaaggtatgagcgaaaggtgagcggatatggctgacaaggggtgagcggtggcggaatgcgatacaggtgggtgtggaaacagggcgggggcgtcaaggtcgttatgagtggagagactagtgagggctggcctccgttttgggcggttgagggaggagagagcctatggcggcggaagagagtgctgttcaggttggccaggcggcagtgagaggcctccgtccgggtgtaataggtgtctgagtaacaactcaaaaagagaaagcgctcagtgcccggcctggacgatgcggcgggcctggaggagtttgcactgtgggatcttagtggaagcgaggcatgagagctggatgagcgaccctgcccgcggttcgagatgacacggaaggacgcacaaggaggttgaccgacgtgctagtcgaaaaggccatgtggtcaatgccggccgccgcaagctggtcggtgaagctgggagaccatgagggtcgatgtgtcagtccttcagcctgatcaagcataggactagcgagacgcacgagtggacgacgctaggctggccgtccgacttgcagagatgaatctcgaccgacccccagacacgcgtgcagccaagatcctccgagaccgagtggcgtctcgtcgtgccgccgagagagcccacggtcgtctctgccgatggcgacgcgagctcctgctgagggccgacggcctcgatccaccgctcgacgtgcgttagctcgccgagtgcgagcgagtggcgctgcgctgctgctggcgacgaccgccgctcgccatgccccgtcgtcgtcaacgccctcgtcagcccagaagcagcgccagcgccgccgcctttggccggccggagggacggtgccgacgcgcgccgtgcgctgtcggtcgtgaagagcgtccggcaggcctcttcggcctcgtcgaggtcctcaggtgcgactgagccagggacaaagcgctcgatcgtcgtcgcgttgccgtagacggcgacctggagcgggccccaaccaacttcatccgcgcagccgtcggcgatgcagcagaagaaggggtggtcagaggcgtcgccgagggcccagcggcggaggaaggcgccgacaccgggcgagccgaggacgagatgcgtgttgacgaggccgaaggacgatttgaagccgatccggacgttagccggaagctggtgcggcggccgagggaagagcgtctgggtcgccgtcggcgaagcgctcgagatgtcctcgctcgccgactcgcacgcgaggccaaacccgtcggagcaagcggctggcgaagggagcgccgaacggcaatcgagccagagcgaggagacaacgtcggccgacagcggcccggcctcgtcgtcgtacgtgtcgtcgctcccggactctgagccgtcgtcgacgatccgggggagcgggcgcggccggtcgagctcgagctcgggcacgaggtcgagagggatgtcggcgccggtcgaggtgcttccttcgctcagccagccctgccgggcaagagcggcacaggcgatgccatagtcggtcgagctggcgagcgaggggttcggcttcgtcagcgggtcgcagggtgtctcggcgcgacgttacgcaccggcagagaaagtagtcgttcgtgtctgagctgaagatcgaaaggggaacgggtcaggacgctcctccatcgcgcatcagggtaaagctgccaacgcaccaggtgtagtaaatggagacgccgtttgcagtaagcaagcgcgagatctgctggacgcgcacgccggagccgccagcgccccccggctccgagagctcctctgggcaaagctcaacctggaagagccgccagccgggctcgatcgtgacaaagtcggcgaagagcctgaagcgatcagagatgccggacgaggacgagacgagcgagagctcgtgcgagttgccggtcctgcgagggcaagcgggatcagcggtccgtgctggtgacgccaccgtaggccagtggtgatggccgcgaagcatcgcaggcaagtgtcctcccaggcaagcgaactcctcttgaggcaagaagtaaggacgcacagcgagaagaagccatcggcctgggtccgcatgtcgtcgagcagctggagaacgggcaggatggcgagtggcacgtgggcctgcttgatggttacgatggcaaccgggtagggccggtgcaggacctcaaacgcgctgctgctgctgctgctgctcaagtagctcgccatcgctcgagctgctttgctggaagtgcaagaggagagagtagtgggagacgggcggtcgtgtaagacttttggagaggggggacgagcttccggccgggcaggggctgctgcgccgtcgaccaagagactgggcgctggagggaacgaggtgggcttggagacgggccgcccgacgagggccgaaagaggggggaaaggaggaacaggggtctgctgaggcaggtagtgggcagacaggaggatcaagcgaggtttgtagggtggcggctagggagagaggagggcacgaaggcggcggaaggtcatctgctggtgggctggctggctcagcagggtccacttccactccactgcctgtgcgacaacccttctgcaagcgccagccgagccggacaaggttgcgctcgcccggagagcatgtcccggcccaaagcctaggagagggcagatgggctaacgggtggatctcgagcggggccggactgtcgtcgacgctgctcctaccgcgccaagacgtgccttccttgacagaaggatcggcgcgccctcctgaccctctgtcttcgaaaccagaaccacaggcacagctcaagcgctgaccggcagtcaggccatgcaggatcgagcgacggcgctgtgcgcgcctcgacgagtccgagagggtacagagcggcgacagggatcgaggcgagggctagaagggcaggagggcggccggcgccttcaaaaggggatgggagagaaggcttgacaggctccctcgcactcctcgaagcgcttgttgcactaccggtcgacaggcaaagtaaggaacgtcagcagagggtcggtgtagcgaggaccactcccgcctgcctgcgcgcgcgcacctcgtccgagttggcctgctcctcgcactggtagcagcgcgggaagcgaaagcagaacggctggggcccaatgtcgccgacgatgccttttggccagtcgccgtccttgacgcagcggaccgtccaggtcgggcagacgctcagcgtcgactgctcgccggcggcgacgaatgaggatggtgcgcgatcaatgaggtcaccgctggcggatgactcgagactgggcgctgggcgggctgctgcgaggagggcgagtgcacagacggcgaagaatatcttgaagaggctgagcatccggtcaggcagtcgatctgatggcgatctggaggaggcgagggcgaggtgcggtcggagggaggagggcagcgagttcgagtcgacacgcttcgctccccctgacggtcatcatcgcatctgcccttttcctggccgggcttctttctccttctctgtttgacctgcagacttcgaccagggtcgtcatgccgactccacccagttcctcgacgagagccccccccgctaggaagccttcgtcgtcgagcatcattgccgccctccaacgcgcctcgttcggcattgcgacactccctccgacctcgagcacggggggcgatcggctgacggacgcggacattgcggagctcattgcaaaggaggcgagggagaaggagaaggtctggcgcgagcatgggctgggggcttaccggtcgacgtgcgttccccccttaccccctcgctcgtcgggtgtggcccccttctcccgcctgcgcgttgctgaccccgaccctctcgcgtcgcttccagtccggtttcagccgctccgaccaagcccaagctgaacaccaacaagcgcttcctctcgtcgatgatccgctcggtcgacgaccacaaccagacgctcctccgccagcaggcggcggccgcgagggaggcacgcgacgcggcgctcgcggcgaacggcagcggtgaggcgtcggctggctttggcgagaggtcgagctcgaggaggcgggagggggacgacgagcggcgctatcggcggcgctcaccggagccggtcaaggagggtcggggtggtcgtggcatgcgcgcctggtccgacgacgacgacgccgactcggtcgaccaccaacagccgccgccgccgtcgagctcctctgtcgccccctcacgcacggcgcagcaatccgacccagccgacaaaggcaaaggccgtgcgagccgcgatgggcgctcacgctcgcccgagagggcctcgtataagcgcagcagcgccaggcggagcatgagccggtcgaccgagcggcgaaccaaatcgagggcctacgaggaggacgacgacgacgggcggcgacgctcgcgccgggttgctgacggggagagcgatggccggcggcgccgggccgaagcagacgacagcgacgaagaggcgcgccgtcggcgccggcggaggaaagagcgcgagcggcttgctcaagaggaggatgacgaggaggaagcggcacggcaccggcgaaggaggaggcgcagggaggaccgcgaggaggagcgacgggaggatgatcggccggggaagagggcggcgagagaggagcggtcgcggtcgcctaggaggtcggtcaggccgtcgacccaacccgaaacctcaacctccggtggcgccggacccagcagggctcgctcgccccctgtcatcgacgccggagccgacgccgatgccgacgccgcctccgccctcggcccgccttccccgcccccaccctccaagatggaccgctacttcgacccgtcctacgatcctcggctcgacctgcccccaccgcccaaaatagggcacgtcggcgaggaatacgagcgaatgcttgccgtgctcgaggagacggagcgcgtgaaggcggaggggaagcggagggcaaagaaggtcggtccctttccacttggctgtcgttcgttcgggtcgttggctgacgagcttgttcgcgtgtcttgcaggagaagaaggccgctgcgaaagcggccgagcgcgctgcccgcaaagcccagaagaacgtcctcggcttcacttcgtcctcgtcgtccgcctccgactctgactctgcggcggcagcagcgagccgcaaacggcgcagaaagaagccggccgtcgaaaagcccccttggctcgccgaggttgagcagcgcgagcgggacgcgatgagcgtcgagtatgcgaagcggggcgaggctagggcttgggatgccgggaaggagggcgatgtcgttgagcggctggcgaggggctagcggtggggggcctcggagcgctcttctgtagaggcacgacgtcatgcctgatggatgaaagacaccctgcttgcctgcctgccaaacggtccaagccccttcaagcccctctgagtcaacccctaaggcgcgcgagcaaaaaaggcccatgtcctattccggcccggctgcgactctgctcgccagcggcgggaacggcccctgcttcgagaggacgacgagctggtgggcgtgcgagatgtagcctttcaggtagccctgtggcgatcgagaggaggggggggggggttagctcggcgaggtcgggtggctctcaccccagcccgctccaaccgccaatcgcccacccgaccaacctgacgcaggagcaggtgcgtcgccccctttcggcttcacgcttgactcttgccccttgcgtgagcgccagcaactgacgcccttgcccgacgtcttgccctttgccttgcccttgcccttgccgccaagcccgacgccgtcgttccttccggcccgcgcgccttcacccgcagccttctcgttccgcttcccaaactcggtgtcaaacgcgcccttcccgatccggatcttcttctttgccgggccctcgcgcgccgccttcggcttcgtctggcgcagaggcttgggttcgggctcggtgatctttgtcggccggagcgccttcttggccgaccggatcgaggcgtcaacagccttggtcgaggcctcgtactctgcgtcctcctccttggccatccgcgagcgcttctgcttgcgcgaaagaccctcgtacttgtcacgcttgcgctatagaagggggccggcagtggtcagcaggtggtcgtgacggcgcaagatggtttccgcgcgcaccttttctgtgggcgccttctccttgcccttctctgacggctggtcaaagcctgagacgtacgcgcccttgctcgcgtctgcggagagaagcacaagccaggttagcccggctccacaagcatcaaaggggggtgggggaggacggaccctgggcgagcttcttctcgcgctccgtctggaaccacgtccgggccggccgcgacatgatctcgtcccggtgaacaattaggttctcgccctttttgatctccatctcggccgtgcgcatctggaagatcgacgccggaatgcgtcagtcaacgaggcctcaagtcaagcctcaggtcaaacgatgacaggactgaccgccttctcctccttctcttccttgaggacctcctggatctcgcccttgagctcgtcaagcgtctcggccatctttaggatcgcctcgggcggaatcacccgatgccttacctggtcgaccggcgacgccttgacggccgccttgagcatcttgcggtcggcctcgccgacaagcgtgattgaccgacccttgcggccagcacgggccgtccgaccgattcggtggatgtaggccgcgagctgacccggcatgtcgtagttgatgaccgtctcgacgcccttgatgtcgagaccgcgcgaggcgaggtcggtcgcgagcaagtactggaccttgccgtccttgaagtcggcgagcgcttgcatacgctgtgatggaggcgagcaagggcgtcagttgctggcgctcacgcaaggggcaagagtcaagcgtgaagccgaaagggggcgacgcacctgctcctgcgtcaggttgccatgcagctcagccgcgccgagcccgcagaggccaaagacgatgcgcatctggtgcgccagcgccttgctccggaagaagacgatacacttgtccttgacggtccggcggcagagggcgagcaggagggcggcccgcgtgccgccgtccgacatgtcctccttgcggacgcggacaaactcctgaacaaggttcttggccgtcttacgggttgagtcgacaaagagccggacgggcttgtcgagcgaaagccggacgagctcgtcgaccgagtcgcccattgtcgccgaaaacagcatcgtctggcgcccgcgggggcacgacgtgatgatctcgttcagttcatccgagaacccggcctcgagcatccggtccgcctcgtcaatgatgagaatgtcgagcgcatcgagcgtaaagctctgcgagttgcggatgtggtcgatcagccgaccgggcgtcgcgatcaggacgtctggcagcgtctttagcgcctgagcctgggccgagagcgagaggccaccgacgaggagggcgaagcggatgtccatgccggccgagagagccttgccgacggcctcgcactggactgcgagctctcgcgtcgggcagagtacgagaacacgcgaggccgcgcccttgccgttccggcccttctcgcggtagagcagccgctcgagcacggggatcataaaggccgccgtctttccggatccggtctgggccgcaccgagaatgtcgcggccgaggagtgcgagcggaatcgcccgggcctggattggcgtcggcgtcgcaaactggagattggtgatgttgcggaggagcggccgcgagaggttcatgctcgaaaaggacgtcggcgtcgtcgagcttgaggcagcctcgggcgcggccgagaagaaggcgtccttccggtccttctgggcctgcgtctcgtgcgtcgacgacgacgacgaggcgaccgaaacgccatcgtcgtcgtcactgtcggcctcctcgttctcctcgttctcctcgtcctcctcgtcctcctcgtcctcctcgtcctcctcctcgtcgtcctcgtcctcctcagagccgtccagatcctcgtcctcctcgtcgacggcgacgatcgtctgcttcatcgggtcgtcgtcgctctcgtcgtccgccgcctcggcgtcgtcgttgtccgagcctccgataccgccccagccgctgccctcgccaccggccccgtcgtcgtcgtcgtcgctcgcctccgcgtcgctgtcgacgtccgagaagccgctgtcgctgtcgctcgcggcagcagccgcagcgccggtcttgccggcggcggcggccttggctgaccgcttgtgctccttgagcgccgaccgccggcgggcgatgatgtcgtcgatgctgacgccctgaagaagtctcgcaaggcagcggacgtcagtcgacctgcactacgctgacacagtcgagctctcgaggagcgcctggcaggctcgcaggagggcgcaccttggctccgacctcgtggacggcatcctcgccgccccaagcgccgggcaggacgccgttctcgcctccggcaaagtcaaagtcgaagtctgggtcgaggtcgtctttctcggccggcggaccgacgaggttgttggactcctcggtatccgagtcgatcgtcaggataaagtcggacatggcgaggcttcggtggtgtggaagagctggtcgagcgagcaagctggcgagggagctcgaagggggggcgcctcgaaattcttgcgcgcagcagccgcagcgagtttcgggcgacgttgcttcgcgccgtgctcattgtcgccagctgatcgagcgccgacgctcacggtcgaggcaggaggcaagctggtcatccaaagggagcagggcaggatatgtctgaggcgaagaaaggcatgcatccgggcgggcatcgtctagtgtggatgcgactctctcccggcgctctaagtgaaagagccctcttccggccaggcttcaagaaggaaggcctactcgccgcccatgtagccgccgacgacctcatagcacgtgaccatgatggcgcaagccggtgcaaccttggccaagcgcgggatgaggccggcaaagagggcgccggtgccctcagtctgcacaatctcgcgcaggacgacgagcgtccgggtcgaggcgacggcggcaggtggtgaggacgggctcaaagctgacggctgaggggtcgtaaagacttggcgacgcgtcttaaggacgtcgaacggggtcgtgatgaaggcggcaatctgcgtgcgagcaagaaggagtcagatcgcgaacagctggggttatcgaggagggagacgcaccatgcccgagccggcaccggcaacgattggcctagcccactcgctctcgcccatgccgccggcgccaaactcgctcgcggccgacttctcccagcggggaccgacgagcagccggcccttgatgacctcgtagccggcccagtagatgcccgagaacggcacgtcgcgccacaatgtcgcgccgagcccggtccagagcgtccttgcgccccttgcggcgacttcggtccggaggtgggcgagcgtcgagcggaccgagggcgcccgttcgcccggggccgagacggcctggaggcgggtccggaagagctcgagcggcgagatgacggtcgccgagatggtccttgcgaggctgcccgcaaagagcggtgtgagcgcgagctgcgagtcggtcggcgtcgccgggaggagggccgaccggaggtggtcgtagccgaccatgtagattgccgaggacgggatgcccatcgccatcgtcgtcccgacgcccttccagaagccccggacgccgctctcgcccgcaatcagacggacttcggaccaaaagccgcgggtcgtctcgcgcgaagcgcatcggaggtcctcgacgagcgcgtgccagcgtgagggcggggccgagcagccggccggttgcgagagcgcgagggtcgagccgcccgcgcctcgcaggtgagggccgccagctgccgcgagggctgatgttgatgctgctgagcgagaggacgaggctgccgctgcggccgaaaaggagggcgtggacgagcaggtgattgccggcccgagccgtgacgacgacgctgcggctgccgcccgtgaggtcgaggccgctgccgaggacgagttgagtgtccgctggcagcaggcagcaggatccgacgctgggaggagcggcaagggtgccggaggtggtcgcctcgtctggagccgcgtcttgaggacgtcaaatggagtcactgggcggacgaggccagtcgtgtcagcatcggaggtcgcccgcagtggagcagtcgtcgtcgctcgatcccctgagtccgatggtcgactcgatcaggcagcagaaagggcagcgactcactcaggagcgaggtagcgaccgcacccgtcattgcgcctacgccctttgcaccgatctggccgagcaggcccttctgacctgctggcggcggcggagacgaggatggtggaggtgagggcagcggcggcgcgggcgaggccgagtcggtccctgcagcgtcgatcaggtgaccgtcaagcaggaggttggaggaggccatgcggcggtgaatggggagctccgctgggtgttgctgtaggcgtgcttagagggaggaggttatcgaagaggacagtcgaggttatggatgacggcagcagggcagccagagtcggacttctcgccgccgccgccgccgccgcgcgttctctgccgccgcgcgcgcgggctgggctgaagctgtcgcgcgggcgggcgcttcgcctccgagcctgtcactcgccaggtcagtctgtcgcatgtcggccgtcccgccgtcgtcgtcgtcgtccctcgtcctccagcacgcagcagccctctctggccagatgccaaaaatgcagcgccaatttcatccgtcgcgcccgaccggtcctgccgccgccgccaacgacggctcgacgacaggacgcagcgcggccgactcatcgctcgagcagcagcagcgcggcgcgccgtcgtcgctcgccatccgaggcgctgcaggtcaaaaggagggtgcgcctctccagcagtcacagcagcaacgctcgcctcgcagccgtggcggaggaggacgcggccgaagcaacggtgccgtcggtgctggtccgccatcgtctggcctcggcttccagcacttgcatccgtcgtcctcgcccggcttcaaccttcagcaaggagcgatcctacctcgaccgccggcgaacggtccgcgagcccagctcttcaacgctggcagctttggcccgtcgaattcatctcacggcggcaacgctggcggcggacggccgcaccagcagcagcagcagcgcaaccacagcagtatggcctttggtcgaccgccgcctggccagcaggccttcatacctcggccagggtcataccggcctcctccgacagaagcagcgcctccagcccagcatcaggcgacggcttcggcctcgacctcgagcgcggtccagcacaccgccggcgggaagacgcacgcgcaccaccaccatcacctctcgtcaggcccgtctcacgcgcacgtccggccgatgtcggccaaggccaagaaggccgatccgtttgccaacctgcccgtctacgactacacgacatttccttcgcgcacgggcgagcggccgacgctcctgcttgtgagcgacccggcgcttgttgacgaggctgtcggccacctccgctcgccggtcggactcgacatcgaatgggcgccgacgttccaggccggcgcggctgtcaaaccgacgtcgctcctccagatctcggacggccagacgatcgtcgtcatccagacgctcgccctcctcggacgctgtccgcctggcctccgcgcgttcctcgaggacacgagcgtggtgaagctcggcgtagggatcctgccggatggcgtcaagctcagccgcgacctcggcgtcgactgccagggcttctacgacctgaatgcgctccggccgccggatgtccagagcccaaagatggcaaagggcctcgcggcgctcaccggcctctacaccggccatcggctccacaagtccaagaatgtcaccatgtcgaactgggcgctcgcaaggctctcgccgtcgcagattgcgtgtgcgtccccctttgtcgactgaaagctaatcggtgggcttgaacactgacctgaacggctctcgcagacgcggcaaacgacgtccagtcggccgtcgacatctatgccgccctccgagccgaagcctccgcctcggacttcgagctcaagggtcccaccggctggtcctggacggcgcccggggcgatcccctccgtcggcaagcgcgtctcggacgaccttgtccggcgcgttgcagccgcgccgggcgcggtcgactactcgagctcgggcttctatccgccgggcttcgagcgcggagagcaggcgccaaaggcaaagaagccggaccctaacagtgagcctctcagtcggtcgttgtcatcggaggacactggctgacccctctattcgtctcttgtcagcatggtgggcgcaggcggtcgagcttttcagggaagggcactcgctggtcgagattggcgtcctgtgcaagccaccgtgcgtctcttccgctctggccctttgcttgtttgcttgcttgatggagaggtcgatggagaggtcgctgacggtttctcgtggtcatggcctcagaacgcagcaagcgcgatcgtcgatggatgtcaggtgcggctggtctacctgccctagctttcagcctccgcttcgccatcaccgggctgactcagagctaccttccctcttcccgtgcaggttcggcatcgccaactacctttcgcgccggtccgagtcgctgacggccgagcagggcaagacgctcctcgccggcctgacgctcgacaccaagggccggatcccgcttacgctgatggtcgaggagctcgtccggcggggctagatgccatgagctcctttctcgcggacaagacgtctcgggacagacacgttctgggttggacggggaggagggacagcggatgcagggcgctctcggtcgtcgagttgcgtgccagccacgctcgcagagggaggcatgagtgacgcgctgagctgccggcgacttgccatggagcgagacgaccggaggacaggacgagggcagggcgatagcgacaagatacagaggcatcgggcacgaaagaccggtcttacaggaggcgggggttgaggacgagcggcaggcgaccggtggccagtcgacagcctgctgctcggcctgctgctcggcctgctgcttggcctctacatgcgttttgtggttggtggactctacggacggacgggtggctgagcgagtcaagaaggagcgtacagagagagcggaccgagagagcgagaaggggcgtaccggaaagactgaccgaggcgctgaccggcccgaacggccccgcctggagggcaggagccgagctcgagatggcgtcgctgcacaagcacaaggtctggctggacgctggtgcccaggccgagggcgtcaacatcgtcggctgccgagacgtgctcgcggagaagaaggacgcacaaggagtgacggtccgctataaggtcggttcgtcgcgcagggcttcagtcgggtgcgactgggaggtccaccagatggaagtcgagacggcctacttgtacggcgaactgcaggaggaggtgtacatgcgtcagcggatcggtcatggagatgggacaccaggagtatacagagcgacatctagggatgtctcctatacgaaggataggtacacccgatgcgggcatcgggtgaccacccgtgcgaggcgcccctgcacagacgtcgggtacaccccacgcggggcgtgcggcgactccttttctgacccacccgatttgaaaatgtactgccgctattgagcgacaggtggagaaagtcctgaaaagccggatttctgcaaaccctatgtctgcctttacctttgtaacggctttccgttctgacgcaccctctgcctggagccctggattcgaggaactgtgatggttcgacctgccaggatcagcagatctcttgctcgcggttcgaactcagggcatcagcccgcacgacagaagagaagtcaagcactaccagttccccacccgtcaccggttcccaactttcacgtggaatctctagtccgacacccggtcgccaccggccgagtctagacccggcaaccctcggtcgccggtcgttctccggcaccagtttcgccggcgtgagtcaccagctccaccgaatcagtcagcatctccaagggatcagtcaacatctccactggatccgtcagcaggcacagccttccagaagatttttcgccatcacacttcagcctacttagacccctgtagacctcgagtcgccacctgaatctcaagcttgcctctttgttcctcccatcgctcgtccttgcccgtcagattctacggcctcaagcaggcggcccctcaagctgcacgaggcactcacggcgatcggtttcgagcggtcgacggcggaccagggcctctactcgctgcggtaggagggagaggagtttcacctcgccgtttacgtcgacgacttcgggctcttcgcgtcgggcgtcaagatcctgagcgaggtcaaggcgcagatcgcatcagcattgacggtcaaggatctgggcgagatgcgcttctgcctcggcatcgaggtcgtgcgggacaggccgcagaggacgctccagatctcccagcggccttacgtcgagcacctggcggccaagtaccacatgacgtcgccccacctggtggttattctgctagatcccagcttggtccggaggaaggcccaaagcccatagacgaacgaggagaggagggagatgttgggcgtaccttacacccaatgctgtgcggcctgctgtgggtagcttgtcactcggcccgacctctcctttgccgtcgtccggctggcctagtttgcggcctgcccgggcaagacgccctggtcagcgctgaatgttgaaggaagagcgtcgtggtagttttgcgggagggtcgccagcgccggcgcgctgcagctcccgcccgcgcggcggtgccggaagttagggttacgcttcatcgaacgtaacacgctttacctccctccgtaacattactctcttgcccttacggcttccaagtcctcatgtattttaagcgttcacccgactgccttgtcccctgcaaggccgtgtcgttcaacagattaagagtctgatccctccaccccccttcctcactatggccgacgccctgctcaacctcgtcacggacgcccctgcgtcctcgacgcagctttaccagaagctcgacgacacttcgctcgccaagtttgaccgcctcccctcgcccctctcggcctccgtcaactacggcgtctggcggcgccgcctccagtctgccccaaagggcatgaggctctgggacctcggcaccggccgccgagctcgtccggccgttggccacccgctcgcccaagcctcctgggacgccgacgatgaggccgccatcgagtttatcatcgccaagctcgacgacatcgaggccgagcgcgtctgaaagtgcacgacggccaagcagcacctcgaagcgctccgggcggcccacctcatcgagggcacggccggcgagatgcagctgctcggtatgcgcatggttcaggggaccgacgtcggcgagcagattgatgcctttctcaccaagatcaacgccatccgccggatcagcggcaagctctaggacctcgacctcctcttcggctacctgctcctgcgcacgctgccagctacgcccgcggccgaaatgctcaagtcatccattcggacccaagtcggcaaggacgccgtcggccagtccctgcccctcacgctcagctacgtcgctaagtccctcatcgaggacgcccagctcctggctgcgacgaccaaccggctcaccgccgctgacggaccaatcgaggcccactcggctctcaccctcacgccctcggccacgactgcctgcttcatctgcggcggccccggccacttcgccctcaattgccccgaccgggctaagtttggcttcaaggacggcggcgccggccgggcgaagtccaagaggtactgcgagtaccacaagaccatcagccacaatacgaccgattgcaacgccaaggaccagtacggctcgggcggcggtcagtgacacgtcggcaacgccgtcaacttggcccagtccgtggtcgccgccggccttcggccctcggtcagcaagtttgttctctcggtgactcctcctccgcccagcccggagccggtcgtcgacgacgaaaggccttggtcggaatccaagtggccgtacgtcccgccgaccccggagcgctgcttcttgctcgacagcggctgctcccagacgtgcgtcaacgaccgcacactcttcagctcgtacgagccctacgccgacacggtctacagtgccagcggccaggcgatgaacgtcgtcggcaagagcacggtcaccgtcatgtcgcatgaacacaacgaggaggaggttttccaggtcgccttgaccgaggtctaccacgtcccggccctctcttcgacgatcctcgtgtcgctcggtcagctttgccaggtcaagggcatctcgttgttcggtgaccgcggcctcttgcttatccgaaacaagggcgacatcatcctgcaggccaaggcctaccagtgcaacctctgggcgctcgacgtcacgctgccgccggccggattccttaatcatgtcgccaaccacgccgagacgccgacgccggccgacctcgagatagacctgctacaccgttggatgggccacatgtcccggaacgcgatggatgctgttctgcgttatcctggcgtgcttattaatgcgatcagctcgaaggacttcaaggcctacttcgacaagggcgtgtgcgagccttgcgtcgggtctcgtcagcacacgacgccgttcccgacgtcaacgaaggtcgtcagcgggcccctcgagctggtctacacggacctacaaggcccgatgcctaacacctcgctcggcggcgcccggtacatgctcaccgtcattgacgcgcacacggaccgctgggcttagtcgatcagggccaagagcgacgcagctggcgtgctcaaaggctggatcctgcaggtcgagcgctagagcggtcacagggtcgtaacaatccgcagcgacaacggcggcgagtacctatcgaccgagtttgttagctggcttcgctcgctgggaatccgtcagcagacaacgattgccgacacgccgcagcagaacggcaaggcggagcgcgcgaaccggacgatcgaggaaaagatcacggccctcctgctcgagtcgggcctgcccggggcgtactgggccgaggccatgacctacgcgctctacgttctggcccggaccgtccgaaagtcgaccggccgggcgcggcatgacgactggttcggctcacccccgtcatttgaccggctccgcatctttggctgcacggcgtacgcgcacaatcccaagcacaagaagcatcaatcgaagtcagtgccgtgctggttcatgtgtccagcggaagacgcagtcggaaagaaggcgtaccgtttggtcgacaagcggaaccgtacaaggtcgtcttttcccgtgacgtcatcttcgacgagggcgggacaatgcgcacgaagggtaacgccagcagtgggagcggccagacggccacgatgacgccgttgactggccaaatgccgctcggacttgaccttcccttgcctccgtcgggtccagcggagattgaggatgttgcaggcgtcgacatggaggaggagaagaagaccgggacggacgtcgagaccgtcggaccgaaaaccgacgacgagtcgggtgcgggcgtcttgtcagaggacgagctacgcgaggaggaggaggaggaggaggaggaggaactggccccgctgccggctgtacctcgcttcgtcgtctctaacccctccctcacggccacttgacgcacgtcgggccgcaagacgcagctgcctgccaggttccgcggacccaaccaggctaacgtcctgatcagccttgatcagcgtccccctccggccgcgccgcccaagacctacaaggaggccgtcagcggactctaccgggccgagtgggaggcggccatgaaggccgagctcgatcagttcgagaagctcgacgtctggacgctccgtcccgtccgcgcctcgtccccgccgcctccagtgatctcgggccgctgggtttatacctgcggcccgacctcggaccccgagatgaccaagttcaaggcccgctgggtcgcccgcggctacgagcagcgcgagggcacctttgatgacacgtactcacccgtcgctgatggtacgccccgccggcctttcttgcaattgtcgccaacgagggcctcacgatccgccaaggcgacgtcaagacagccttcttctacgccaagctcgacgagtcgatctggattacccaccgcccggctacgccgactcgcccgatcagctgtgctacgtcagctcggccgtctacggcctgcgccagtcgccgaaggctttctatgaccgaatcgcttcgttcctggtcagcatcggcctcgttccgattgagtcggacaagtgtgtcttcctcggccagcggtatggccagaaagtcatccttatgctgtacgttgacgactttgtcgtcgctggctcggccgagggcgttgccgacgtctttgcggccattgggcgcgagtttgatgttgacgaccgaggctcgctcgaccctggtgagctgctcggcatggagttcacccgggaccgggcgaccggcacggtcagtatcacacagacggccttcattgacgaggttctcgaccggttcgactcgaccgacatcgctccgcgcacgacgatggactcgaccctccagctctgggatgccaattgcccgtcgaccccggacgtcagcctccgcctgcggtatcaggagttagtcggctgcctcaattacctcgtcacctgcacgcgctacgacctggcgtacgcagtgggagtgctgtcgcgcttttgcaacaaccccggcaccgctcactgggaggccgccctccgcatcctcgcttacctcgcatgcacgagggccttcgccctcacactcggcggccagactgaccggcccgcgctcgagctcttcaccgactcggaccacgccggtgacaaggacagccgcaagtcagtcacaggcgtcctcgtctttgccttcggctcgctcgtctactggaagagcaagaggatcaacgccatcaccaagtcctctcgggagtccgagtacgttgcccactccaagggcgcgtcgcaggtcatctggctgcgggcctttcttggtcagctcggctaccagaccccgtcagtcgccgcctggtccgacaaccagggcgccatcgcctcagtcaaaagcggcgagctccaccacgggtcgaagcacatcgacgtcgcgtacaagtatgcgcgcgacctctaccggaagggtgtgctcgacctggactgggtcagcacgcatgccatgcccgctgacttactcaccaaggctttgccccgcgagacgttcgagcggctccgccccagcggcggcctacagggcccggtctcggcccgcgcgttgttcgtcaactcggtcgtcggtcagctcgctcggcctccgccgctggtcagtatggccacccctcagacgctctccgtgacattcggccgagcagtgggagcgttagacgagaagaagtcgtcgcccggcccgctagagccgccagcgaagcccgtccctcgcgcccgcggccgcgagcccgcctccaaggcctccaagattgctctagacgacgacgcaattcagcccatccggacgcaagaaggacgtaccatggccttgaagagtcgctctggccgctccgactttgttctgcccgagccggacacctgggcaggcccttgcgacttggggggcgcgccatcgacctcgttcgacctcgctcgggtcgatcttggtcagccgcaggctctggaagggggccagtcaatcccctaggtcagctggctcttggcgccggcaccctttccagcgctggatgggtcgaggggaggtcaccacgacgagtgggagtgttgaaggaagagcgtcgtggtagttttgcgggagggtcgccagcgccggcgcgctgcagctcccgcccgcgcggcggtgccggaagttagggttacgcttcatcgaacgtaacacgctttacctccctccgtaacatcacactcttgccctgacggcttcctccctcatagcaatcgaagagggtccccgcttacctcgcgacgacgaaggaatgggccctgacctaaggcgcgggcgggagaaacggattgacgttggaggtctactcggatgcggactacgcctcggccgatatcgacggccgccgctcacacagcgcttacgtctccatgctcaatggtggcgccatcggctgggcatccaagaagcaggagagcgtcgtaatatctacgtgcgaggcggagtacgtcgcgctggctcatgcggtcatggagacgatctggctgcggtcggtgctgacgtcgctgcggctcccccctccggccccacgacggtctacgaggacaaccgcggtgcccgagcgctcgccatgaacccgaactcgcacgctcgctcgaagcacattgacatccgtcatcacttgacgcgcgacaaggtcgaggatggcacggtggtcatcgtgtcgatgccgacgaaccagatgctcgccgacctggggacgaagctcctaggtcggctgaagcatcagtacttctcgttcggcatgggtctccgggggcacggtctcgccccctcccagccggaaccagagggatcagaggttgcagacgatgcagctcgtcgagagggagtgttgaagttgcgacgagtgcggcgcggcgtgcagagccagcggcggcagcaggcggctgcgcgcgcgctggcggccgcgcgcctgccgatgtactcctgacgcgcggactgcatcggcattccgcctcttttctctctgcctcttagcttttcccttcccccccgacgctcgctccccgccaccgttaggccctcggcaggtcgtccgccggtcttttgtgtacgactagacacccatctcggtgatccatgaggttgtaggactcgtcttgagccgtcgtccggcttgcgtcctcagcttccggcgtccggggacgaccactacccgtcctgcggcgaacgatcaagacatcgagagaggggtacatggcagcacacccttgagaagactgcttcgtccaacgtgagcgccgctaggagttgcaggagtcgagaccgaagacgcgagaccgcgccgaaaggggtcgtctcttgcccccaagccgtgcacaggacctcatcaagcaggcaccgtcgcctgtcctcaacctggctgcagtcctcatcgctaccagccgaggggtatcgtcgcccggtgctgaggcgtcggcaccctgccctgccatttgaactccgtgtccggccgccggtcgtcgggcgggcgggcgccgcttccgtcgtcgacatctgccgaggctccatcggttgcttcgtcctcttatatgggtctcgctacatctctgaatctcattgcaagagccgtctcgagcgagcttcctcctccctaagcaggtgcgtccctgccgtcatggtcgtccggcaagcgagatctcgacagccggccgcctgcgcgcgtcgcagtagggcaactgccgcacgacgacgctggcgcgcgacctcctccgtcgaccggcagctcatcctctctcccgtttacaaccttcctcggtaagatgctctctgccacgcgcacgctcggtctccggtctcaggcgcgctcgctcgccgcccggtacgcgacgacgccacctgcccaggcaggaggttacgccgcgcccacgtctgacgtcggcgggcccgcgcccaagcccaacaaggccgcgagctcgtcgtcgtcggccgcccagctgccagtccagcacatccagcgcgagatgaagatcatgaacccccggacgtccaagaaggagcggctcatcatcctcggctcgggctggggcggcttcacgctcgtgagtccctttctctccctctctcggctcgcaaagggcgacggcggccggccgcgcgcgcgagtggcggtttgagaacccagaattcgcccgcgtcacgacgacatcgaagggggggggaccgggtcgtcgggcgaactcatgcgctgccactcaactcctccggacgaccttcgtccggctgagcgggcctttgctcgctcgaccaatctccgccgttgccggccagcgagagtcgcaagctgacattcaacccctgcgccacccgcgtcaggccaagagcctcgcccgtcgcagcctctacgacgtgaccgtcatctccccgaccggctactttgccttcacgccgctcctcgcgtcgacctcggtcggcacgcttgagtaccgcgtcgcgctcgagtcggtccgccggctgccgggcgtccagctcattctcggccgggctcgcgacatcgacatcaagaagaaccagatcacgatcgcctcgggcgtgcccaacccggcgaaatcgcagtggtcgacgtcggctccgccccgggcgctcggctcgcccttccgggacgaggccaagggccgcgagagtgagggtgcggccgaggaggagctcttcgcgcttgagtacgacaaactggtcgtcgccgtcggcgccttcagcgcaacctttggcacgcctggtgtgcgtttctcagcgctcatggaccgcacgccgcgagagagggctgacgtcgatcatttctcgctttcgcaggtctacgagcacgcccacttcctcaaggacatccgtgacgcgcgcgccatccgcaagcgcatcctcgactgcttcgagcgcgcgtcggagccgttcgtccgtgagaaggagaagcgcgagctcgtctccttccgcatcgtcggtggcggtcccaccgtgcgtcgcgcttctgagcgctcagcgcgccaagctgcctgtcgcttactcctcttttcctcccgcctgcctcccagggtgtcgagtttgcggccgagctccacgacctcatctctagcgacatgaagaagcactatcctgacctcgcaaagatggcgtcgatcacgctttacgacgttgcgcccgggatcctcctctcgttcgaggagtcgctccagcgctacgccatgaacacgtttgcgcgcgaccaggtcattgtccggccaaattcgaaggtcaaccgtgtcggcgacggctggatggagatcgagggcgagggcaaggtgccgtttggcctgctcgtctggtcgaccggtctcgaggccaacccgctcatcaagtcgatgaagggcgtctcaaaggatgaccgttcgctgtcgtgcgttctcgctcgtctccccgaggcctcattgcgtctcgtctctgaccgtgcccttgcgccttctcaccacccaggcttcacaccgacgacttcctccgcgtcattggcgacgagggccggccgatcgacaacgtctttgccatcggcgacaacgccgtcgtcaaggacggcgaccggctgccggcgacggcccaggtcgcctcgcaaaaggcgaccgtcctcgccaagaacctgaccgcgctcgccaagggcggacccgagcagccgttcaggctccattcgcagggctcgatggtctacctcggctcgtggcgggccatgattgaccggtcgtctccctctgtcgaaggcatcaagggcacagacaccggctactcggcctggttcctctggcggtcggcctactggggcatggccatgtcgtggcgcaatcgggccctcctgctcgtctagtgcgttgcctcggttctcgtcggtgacgaggcccctcatgctgacacctcacctcatcccctcttgcagctggttcacgaccgccctctctggccgcgacatctcgcgcttctaacctcggcaccccatcacttgccgtcccatgcatctgccctcatcacacgtcctgccatatcacacatctcacgcacgaccacacgccgccttttgcttacccctacctgtatccagcagcagcctcccgactcatagaccttagagcggccagtgccccgagtgcgcgtgcgacctcttctttccggcgagtcgtcggcctcgagatcccactggctgcaccaatagatgtgcttgaccctcacccttgcgctcggcttgcttcttccgtcgactgagtgttacgttatcagagcatggcgatgtgcctgacccaacatgcgtcgtcgcgcgagtggccgaagcgccgccgcgtcggcccacttggccttgcagcctcccgctcgccccctgtctcttgcaccttcacccaccttcctcactccaaacctagacacctcgctcgcagccatggccaccctccggaagaagctcgtcatcgtcggtcagtcgcccctggtcctgctcagatgcaggccgtcactagcggtcgagcgagccgacatggcagacgacgacgttcgagctgacccgcccacctccgcctcgccctctcgctcctctctgcccatcccatcgaatctcggcgccatcgacgcgtgttcgactcgctaggcgacggagcctgcggaaagacctgtcttcttatcgtcttctcgtgagtggcccctctaggacggtccgtcgaggatgagccaactgctgacccgcccggccgcttcctcctccgctcaactctagcaagggcaccttcccggaggcacgtcgttggcacatgatggcctttgctagcaccggacagtcagactgaccttgcttcttccgcaactgctcattaggtctacgtcccgaccgtcttcgaggtgcgtgcccggtcgacgttcccgagttcggcgacgtgttggctgacggctcctccctgtcctccaccgcgcttcgtgctcctgttctcgtccgcagaactacgtcgccggtccgtttctcctcctctgccgtcagaagttgttctcggaacctctcgctgatctcgacgctatctgaacgctctcggccgcagacgtcgaggtcgacggtaagaaggtcgagctcgccctttgggatactgccggccaagaggactacgaccggctgcggccgctctcgtaccctgactcccacgtcatcctcatctgcttctcggtcgactcgcccgactcgctcgacaacgtccaggagaaggtgcgtagagctcgctcgccgtccgcaccgtgacgtacaatcgcaagcggccccagctgatgccccgacgacttgcgccgccttctgcagtggatctccgaggtcctccacttctgctcgaacctgcccatcatcctcgttggctgcaagaaggacctccggaacgacccgcggacgatcgaggagctccgcaagacgtcgcagcggcccgtctcggcccaagaggtgcgccgagactgacggcggtcgcttcttcagctttctgacctttgccttttgtccccttgcatctctggcaggcacaagccgtcgcgcagaagattggcgctcggcggtacatcgagtgctctgcccggaccggcgagggcgtccgcgacgtcttccagacggccacccgcgaggctctctcggtgcgtctgccacctcagacgataccctggccaatcgcgctgatccttcctacgcctctctgtcgtccctccagtccaaggtgaagccgtcgaagagcaagaagaagggcggctgcatcgtcctctgatcgactcgctcgcgcctgccctcgtctctgccactctcgcgtcccgcatgcgggacgaccctgcttcgaaccttcgtccctctgtagccctttcctctgcctttgcccgtaatctcgagcgcctcggccgatcgacgccgccgtcgcgtcgccatgcccgagatgctcctcgcctttctttatctctggcccaccggcacgccccggcggtgtacgacgcccacccgttttcttctctttcgctggccgttgatagggcggacctttcgtgcgacgtcgcgcatgcttctggctctctggcgcgcactctcgcccgattagggacgaccggccggcgtcgccgggccgggcgagtctgggacccttttaaccgaggccgcagaacgcggggaaaagaaggaggcagaggaggcaaggggaccgccgccgtgggcgagaagagcagggccaggcggcggcttgcgattgggtgagagagcgacgccggcctctgtctcgtcgagccgccggtctggacacaccgcacccccccgcgtgtgcgcggcgccgagcccgtcgagagccagccagagagtcggagcgagaggagggcagcaggcaggcggaagggggagacgagaggtcggaccgaacacactctctgtcgagtgctgtcggctcccccgctacgggcctccgtggaagccggccaggcctgacctggtcgttggctggctgggtcgtcgtccttcctccgacgcgggcgaggtagctcggccgggcgatcggtccccgcagttgccggctcgacggcggggtcgggtcgacggagcagcgtgggtcgcccggccctgggtttggctcgtgtggcttatcgaacctgctgacccgacccttggctgcgccccgatcccgcctcgagagagcaccaggccctttcttaaggacgagcgccgagtccttcttctttttctcctctccatccctccctccgtccgtctctttgccttcctttccctgctctcctctatcggcaagcagcagcagcagcaagcgagcgagcagcccacacagaaacgatgagcgcccccgtttaccagtcgagcgcggccaacgtcgccgaggacggcagccggtcgtcccagtcggacgtcgacaccaagaacccaacgcataacgccgacgtcgccaacgagctcgagaagggccacccggagacggccgccgccctgacgcatgagatcgaggaggacgacaagcaggtacgcctccttatcaggggcttgagggagggagggaggggccaaggggggaggcaagagaggctccgcaccgcgcccgtcggagggagcgagccctcttcagccccacatgagcgcgcgcgacgcccgttttcttctccgccgagcgcctcggcctgacaccggcccgaccctcctctcctttttcccttccaaggtctggcaccagaagtacaagcgccatctggtctgggcaaaggctcgttacattgtcctcccggcactcgcggctctcatcatcggatgtacgtcgtcgcttcccgatttttcctgtcgcgcgcagccggcattttgctcacacgaccctattcttctccagggtgggcctcaagtatcgccaacgaggcgacccggaaccggtggatccagtcgaccgtcctcgcctggttctttatcggcctcatcttctttagctttgtcgattctggcatctttggccggccgatgggcgctgcctggacggcgtgcatcagcaacccgttcttcaagctgcccaagatggcccgctacggcatcggctggctctcgctcctcgccctcgtctttggctcgtcgttcggtttcccgctcaagagcggcacgacctacggccagcgtgtcatctcgatcttcgggtccgtcgcccgccgctcttctgcgcaacggcgcaagaagctgacgccggaccgtcccttccgccagtctcttctgcttccagtgcatctacttcctctcgtcgcgcaaccgcaagctcatccagtggaacaccgtcatcgtcggcctgtgcttccagcagattgttgccatgtttgtcctcaagactggagcgggcttctccctcttcaagtggatggccgacgccgccgctgacttcctcaagcagggtggcaaggccgcgaccttcttcaccggccactcggacgagtttgagtcgtggttcctcgtcggcacgctcggcgcggtcatcttcttcgtcgccttcgtccagatggtgcgttgtgttctgtttgctcgcgtgtgcgcgctgcaaacgctgacttgctcgccttttcctcgcagatgttctacctcggcgctatgtcgtggctcatcgccaagtttgcctggctcttcttcaagatgatgaacatctcgggcgctgaggccgtcattgccgccgcctcgcccttcatcggccagggcgagtcggcctgcatggtcaagccctttgtcgacctcatgacgccctcggagctccacctagccatgacctcgggcttctcgaccatctcgggctcggtcctgaccggctacatccagctcggcatcccgcccgagtcgctcatcaccgcctcgatcatgtcgatcccggcctcgatcgccatctccaagattgtctacccggaggacgatgtcccgcttacgctcggccggatcgtcgtcgaccgcggatccgaggacgaggagcgggaggccaacgcccttcacgccttctcgaacggcgcctggttcggtctcaaggtcgccggtctcatcctctgcaacgtcctcgtcgtcctcgccctcctctacatcatcgatggcctcctcatctggatcggtcgcgcctggaacatcgaggcctttacgctcgagttcatgttccagtacatcttctacccgctctcgtggctcatgggcgtcccgaagcaggaccttctgacggtcggctcgctcctcggcctcaagctgtttggcgtgcgttctttctctcggccttgacccctcatccctcgctgacgtctctctctctcttcgcagaacgaaaaagggggggggggatgggtgggagaggggttggtttcgccggctagagctaggcgaaggggcgcgggggttccgagtagaaggtgaagagcaggcgaggactttagaatgtacagagatccttgacagctgtggagcttgggtcgaggaggaggtcggtggggaggagggcgagtcgcgacgtgacagcaaacagaagagggtcgactgcgcgccacccattgcctcgcgccccctctttatgcgtcctgccgcctcactctcatgtgcacttggggaagaggccgggtctacgactcgccatgctcggtccgtcccagccgctcctcgacgagcgcgagcgccttgactgggacgagatcggttgggccaaagtcgaagagcttgacggccgtctggcctccgcgtaaggctgcaggcaggcacggtccggaccaagcctggacgggtcagcgcaatgtcaccgctacgaaggctctccgccagaacgtactctggtaaggtggtgcgcccggccgagtctcgtcgacgtcgtcggccttgacgtagtacgtgagagcgctggcaacgaacgagggggtttggagaaagaggttagcctgcggaagtggatccaacgagaagcctgtcggcacgtacatcctttcgctgtccatctggacgctcgaaatgacctcggccgcggtctcggtgacgtccagaagctgatggacggtcagagataacggctctccctccttttgatagtgttcgagagcgtcgacggtcggcaggtcgtcgtaggcgatgtagagaactctcgaccgctgcaagcgtgcaagtaagggtctcagcaactggtcatcgtcgacaagagcagagaaagactgacggtggtgataacggcgccacgctccgaggaacagaggttgaaggcaggatggccgagatcgagcacaagcgtgtggctgtcctggaggctgcgcggatcggcaaaaacgcgctcgtgctctagcaggatgaagacgtagttttgtctcgagatgaggaagaggtgcttcccacacgagtggacgctgtggcgaaacacgcaacagagcaatcagcttcttcctcttgtcgagagcgagagtgccgcggtggactgacgcgttcaagtcgaggcggcctgatggtggttgtggccagcccttcgagtccttctcggcgggcagagtccagacgcgcgccttgagcccgtcaccggcggcgagcccgaggccgaagctgacgacctcatatccgtccgaggtgaagccgacattcgctcggcgcatgcgctcgggcggagtctgctcgcccggctgttgagcgtggaccagtggcaggcggagggcggcaaccgggaccctggcggggaagcgatagacgagttggccggtcaaaggctcggtagggtcggccgaggcctcggttggccgccgataataggagaggaactcggaatcgacgatcaggacgtgcgagagcgttagctcgacgtctacgggagaggattggctgtcagattcaaacgacataacgcggattgactgcttccgctcacacataatgctttgcgtgttggtcgggctgagagcaatcgtggcgagcagcgagcatgtcctgacgtcccagagccatgcgttgcgagtgttcatcccgccgacgagcagatgaggaaagacgagcctagtcacagcacaaggaagtcagcgcaatgatacacactggagtcaggagtctggtgacgacggaccggtacgctcggatgggtcccgggctgtcgagcgtgccccagacggcgaacgatcgcgggtcatcgtcgttgctctcgatgccgtctactcgtgcgacatcggccctgagacggtacactgtgtggctatggccgtctgaatacctcgagagcagagcagaagcagagcgctcagtaaggttctaggcaggttggacgatgaaaggcgcacctggattgtcgacgacgaggtagccccggtcaaactcgacgtgcgcgtacggccgaacctggagagggccgagcgtcagcgacacagacagagctcatcagctctgacaccgcacctctgcgatcctctggatgggccggttcgtttgcaggtcgacgatcgaaagtcctcctgcgagggcaggccgaccgtcagtagccggcgcgcagccgcacccgtcgtgccctcttgacgagacggcgcacctccacgggccgacatgatgaccgactgcgagtcttcgtcgagcttgatccgccagacgtccctcgaggggttgacgagccagccagacgtcgcccggcagtgccgccagttggtcgagagcaccttggcctgccgaccttgacgccgccatcgcagccaagagcacgcgcaggggtcagccgtcgacctcgagccctcagcaagagagaccagcttgctcacaagcctctctccagtcgttgacccgatctccctcggccgagcctgctgtccggcgtgctggcgtcaagccctcgagcgccaaaacgtcgcgatagaggcagttgctgtggtcggcgatcagcgccagccaggctgacgagacccgctggcaggcagcaagtgccggaagtcggaggaagccaaagacgagcaggatcacctcggcaggcagctggtcgatcatgctgggaggcttgtggtgatgaggaggcagagatggtcgggccatcgtatgagggtccggtcgagagcccggctcaggccgaaccgttgcccgcgcttaccctgctccttctcgacatcgacctgccctcttcttcgtagccaaccttctcttgctcgaccgacacgccagaggcgagccagatcgtcctacagccacccctctagcgtcgaacccgtcaacctcaaaacccgactcctcgtcggcctttcctccgccgcactactccgcacgcgaggcctctcagcagcaagcagccatggtcggtggcacgggccccgaaccgcttctctcgccccctccgctcggtcgcttcctctcgaatggctcgtcgagtggcggagagtcttcctcgggcgatgccgtcgacgagcggtccggtccaccgatagcaggcccgtcgcggatcacggccggcggcgccaagggtggcacgcctccgctcgacctctaccggctcatgcgtcggcttagcacgtcgtcatcgtcgtcctcggcgtcttcgtcgtttggctcggccagacggtcggcttctgcgagcgagggggacagcgaggcgactggcagcagcgagggctcgttcgtttggctcgcggtggtgcgtcgagccggctcccatgtgagaggacgtcagcccgacccggccgctgaccgtctctcgtcctttccgaccgttccagctccgggccaagctcgagcacgtcgaggacatggcttgcttcctgaaaggtctgtcgctgtgctcggtcgactgggggttcttccctcgctgaccccccgctgcgcgccgccgctcgccttgtgttgcctcaggcgtctcatcccgcgtgctcgataacgagcccgacgtcctgtcgcaccggatcctgcgcggggtcgacgacgaggacgagatcctcggctgcaagtttgtcgtctatgccgagtgcgttcctcgcaagatgccggctcagacacccggcgaggctgacgcagcccttgactccctcgccggcgatgatcgaatgcaccgcacgcgccgcaggttccgcaacgacgacgctttcgactcgcacatccagagtgcgttccactaccttcgcgctgctggtttctgaggctgacagcccgcgcgccctgcaggcgaagagttccagctgctggtgtgcgttctaggcggtttccgatgcgcccgcctcgaccctgcgctgacgctcctctgcccttctctcagcaacaatgctaagctcctcgctgtgcgtagcgaagctgcagcctttcgaaccaaaggagatcagcgctgacccctcgcatacgacaatccgccctccagggtgcaccgcaactttacagctatcgcgacatcaccaccggcgacaacgaggggtccgattactagcgccgctcgcccatctttttctcttcaagatctcttttctccttttactcttgggccttttccagcatcctcactcattcctgccgcggcaaagtcgatcgcgcatgcatgcttcctctcacgttccttctcgtcgcaggccgtcagtcagtgcgaggcctctggcgcatcgtcgccaacgagctcccacatcctctcgaaccccttgacttcttcctcggtcagcggccctcccccaagcgcatctagcgcagcctcgagctgctcgggccgcgatgcgccgaggactatgccgtcgccgagcgaggcgtcgagcgacgagtggtgggcgagccagcggagcgagagggcgagcgggtggggcgtgagctcattcaggtgccggacggcggcaaagatgcccttcttgaaccagactcctttgaagactgaggccttgcggctgtct
